United States Patent Application Publication US 2023/0331825 A1 - sequence listing, part 2

SEQ ID NO: 15917 - protein, 19 aa, Artificial Sequence
  Synthetic polypeptide representing artificial human antibody CDR-H3 region
ASDDRTTYSEHSGHSNFDY

SEQ ID NO: 15918 - protein, 7 aa, Artificial Sequence
  Synthetic polypeptide representing artificial human antibody CDR-H3 region
ATRELLL

SEQ ID NO: 15919 - protein, 14 aa, Artificial Sequence
  Synthetic polypeptide representing artificial human antibody CDR-H3 region
ARDRHIVVVTGVDS

SEQ ID NO: 15920 - protein, 19 aa, Artificial Sequence
  Synthetic polypeptide representing artificial human antibody CDR-H3 region
ASDDRTNYFDNSGYSNFDY

SEQ ID NO: 15921 - protein, 19 aa, Artificial Sequence
  Synthetic polypeptide representing artificial human antibody CDR-H3 region
ASDDRTNYYDNSGYSNFDY

SEQ ID NO: 15922 - protein, 20 aa, Artificial Sequence
  Synthetic polypeptide representing artificial human antibody CDR-H3 region
ARLVGTCTTVSCFRRGWFDS

SEQ ID NO: 15923 - protein, 13 aa, Artificial Sequence
  Synthetic polypeptide representing artificial human antibody CDR-H3 region
AKAGDASSSHFDL

SEQ ID NO: 15924 - protein, 21 aa, Artificial Sequence
  Synthetic polypeptide representing artificial human antibody CDR-H3 region
ATAPYSGPYYAGGWGPYYFDS

SEQ ID NO: 15925 - protein, 18 aa, Artificial Sequence
  Synthetic polypeptide representing artificial human antibody CDR-H3 region
AKDRGLTGRYYWWYYFDS

SEQ ID NO: 15926 - protein, 15 aa, Artificial Sequence
  Synthetic polypeptide representing artificial human antibody CDR-H3 region
AREGESSGRAGIFDV

SEQ ID NO: 15927 - protein, 16 aa, Artificial Sequence
  Synthetic polypeptide representing artificial human antibody CDR-H3 region
ARDLASWFGELPSFGI

SEQ ID NO: 15928 - protein, 16 aa, Artificial Sequence
  Synthetic polypeptide representing artificial human antibody CDR-H3 region
ARSNLDASVSTESFDS

SEQ ID NO: 15929 - protein, 13 aa, Artificial Sequence
  Synthetic polypeptide representing artificial human antibody CDR-H3 region
ARQSRGLAAAADY

SEQ ID NO: 15930 - protein, 15 aa, Artificial Sequence
  Synthetic polypeptide representing artificial human antibody CDR-H3 region
GSARVESGGHYFLDY

SEQ ID NO: 15931 - protein, 15 aa, Artificial Sequence
  Synthetic polypeptide representing artificial human antibody CDR-H3 region
AKGQYTSIWYGGIDS

SEQ ID NO: 15932 - protein, 19 aa, Artificial Sequence
  Synthetic polypeptide representing artificial human antibody CDR-H3 region
ASDDRTNYYYNSGYSNFDY

SEQ ID NO: 15933 - protein, 19 aa, Artificial Sequence
  Synthetic polypeptide representing artificial human antibody CDR-H3 region
AADDRRTYYENSGYANFDY

SEQ ID NO: 15934 - protein, 9 aa, Artificial Sequence
  Synthetic polypeptide representing artificial human antibody CDR-H3 region
ARRALSPSS

SEQ ID NO: 15935 - protein, 14 aa, Artificial Sequence
  Synthetic polypeptide representing artificial human antibody CDR-H3 region
TRHLGRQRDYGWDA

SEQ ID NO: 15936 - protein, 14 aa, Artificial Sequence
  Synthetic polypeptide representing artificial human antibody CDR-H3 region
VKDRGVSYHLYFDY

SEQ ID NO: 15937 - protein, 19 aa, Artificial Sequence
  Synthetic polypeptide representing artificial human antibody CDR-H3 region
AGGKKQWLVLNREVHWFDP

SEQ ID NO: 15938 - protein, 15 aa, Artificial Sequence
  Synthetic polypeptide representing artificial human antibody CDR-H3 region
ATEGGSSGKCGYFDY

SEQ ID NO: 15939 - protein, 12 aa, Artificial Sequence
  Synthetic polypeptide representing artificial human antibody CDR-H3 region
ARSYSNGQSPGY

SEQ ID NO: 15940 - protein, 13 aa, Artificial Sequence
  Synthetic polypeptide representing artificial human antibody CDR-H3 region
ARHRGGYDSRLPY

SEQ ID NO: 15941 - protein, 14 aa, Artificial Sequence
  Synthetic polypeptide representing artificial human antibody CDR-H3 region
AAGHKGNYYYGMDV

SEQ ID NO: 15942 - protein, 18 aa, Artificial Sequence
  Synthetic polypeptide representing artificial human antibody CDR-H3 region
ARDLYFYDDNIGYYVQDY

SEQ ID NO: 15943 - protein, 14 aa, Artificial Sequence
  Synthetic polypeptide representing artificial human antibody CDR-H3 region
ARHLKKSGIYQFDY

SEQ ID NO: 15944 - protein, 17 aa, Artificial Sequence
  Synthetic polypeptide representing artificial human antibody CDR-H3 region
ARSRGYSGYRGGYYFEY

SEQ ID NO: 15945 - protein, 11 aa, Artificial Sequence
  Synthetic polypeptide representing artificial human antibody CDR-H3 region
VPRYTNHWFDN

SEQ ID NO: 15946 - protein, 16 aa, Artificial Sequence
  Synthetic polypeptide representing artificial human antibody CDR-H3 region
ARALYSSNWFKDAFDI

SEQ ID NO: 15947 - protein, 14 aa, Artificial Sequence
  Synthetic polypeptide representing artificial human antibody CDR-H3 region
ARDLGRRFYYGMDV

SEQ ID NO: 15948 - protein, 16 aa, Artificial Sequence
  Synthetic polypeptide representing artificial human antibody CDR-H3 region
AKDLFRASSELRALDY

SEQ ID NO: 15949 - protein, 14 aa, Artificial Sequence
  Synthetic polypeptide representing artificial human antibody CDR-H3 region
SKGGAAPPGNWFDR

SEQ ID NO: 15950 - protein, 17 aa, Artificial Sequence
  Synthetic polypeptide representing artificial human antibody CDR-H3 region
AKVHWHSSNPYWGGLDP

SEQ ID NO: 15951 - protein, 13 aa, Artificial Sequence
  Synthetic polypeptide representing artificial human antibody CDR-H3 region
ARGNRIGGTSGHY

SEQ ID NO: 15952 - protein, 11 aa, Artificial Sequence
  Synthetic polypeptide representing artificial human antibody CDR-H3 region
VPRYTSHWFDN

SEQ ID NO: 15953 - protein, 16 aa, Artificial Sequence
  Synthetic polypeptide representing artificial human antibody CDR-H3 region
AIKTAYCGSDCYRFDH

SEQ ID NO: 15954 - protein, 12 aa, Artificial Sequence
  Synthetic polypeptide representing artificial human antibody CDR-H3 region
ARDGHYGWAFDI

SEQ ID NO: 15955 - protein, 10 aa, Artificial Sequence
  Synthetic polypeptide representing artificial human antibody CDR-H3 region
ARHRSVTLDF

SEQ ID NO: 15956 - protein, 14 aa, Artificial Sequence
  Synthetic polypeptide representing artificial human antibody CDR-H3 region
ARGGSAPPGNWFAA

SEQ ID NO: 15957 - protein, 18 aa, Artificial Sequence
  Synthetic polypeptide representing artificial human antibody CDR-H3 region
TTDRGIRVGEYHYYGMDV

SEQ ID NO: 15958 - protein, 9 aa, Artificial Sequence
  Synthetic polypeptide representing artificial human antibody CDR-H3 region
ARDFWSGLY

SEQ ID NO: 15959 - protein, 17 aa, Artificial Sequence
  Synthetic polypeptide representing artificial human antibody CDR-H3 region
AHRLMSGSPWPWGYFDY

SEQ ID NO: 15960 - protein, 13 aa, Artificial Sequence
  Synthetic polypeptide representing artificial human antibody CDR-H3 region
ARGARIGGTAGHY

SEQ ID NO: 15961 - protein, 11 aa, Artificial Sequence
  Synthetic polypeptide representing artificial human antibody CDR-H3 region
ASDPRTTLFDY

SEQ ID NO: 15962 - protein, 16 aa, Artificial Sequence
  Synthetic polypeptide representing artificial human antibody CDR-H3 region
ARLLPLEGPAAPNFDY

SEQ ID NO: 15963 - protein, 25 aa, Artificial Sequence
  Synthetic polypeptide representing artificial human antibody CDR-H3 region
ARSSLSSRLALIIVVNYPNFYYFDS

SEQ ID NO: 15964 - protein, 17 aa, Artificial Sequence
  Synthetic polypeptide representing artificial human antibody CDR-H3 region
ARSHYVGSESYRDALDI

SEQ ID NO: 15965 - protein, 13 aa, Artificial Sequence
  Synthetic polypeptide representing artificial human antibody CDR-H3 region
AKLIGALRGATDH

SEQ ID NO: 15966 - protein, 12 aa, Artificial Sequence
  Synthetic polypeptide representing artificial human antibody CDR-H3 region
AKTHISGWCFDY

SEQ ID NO: 15967 - protein, 21 aa, Artificial Sequence
  Synthetic polypeptide representing artificial human antibody CDR-H3 region
AKESAALLWVGAEKKGNWFDP

SEQ ID NO: 15968 - protein, 14 aa, Artificial Sequence
  Synthetic polypeptide representing artificial human antibody CDR-H3 region
SKGGAAPPGNWFDR

SEQ ID NO: 15969 - protein, 14 aa, Artificial Sequence
  Synthetic polypeptide representing artificial human antibody CDR-H3 region
ARGLRWFGELEFDP

SEQ ID NO: 15970 - protein, 17 aa, Artificial Sequence
  Synthetic polypeptide representing artificial human antibody CDR-H3 region
AKGPGLRWELVRRYFER

SEQ ID NO: 15971 - protein, 13 aa, Artificial Sequence
  Synthetic polypeptide representing artificial human antibody CDR-H3 region
TRDSAGATPAFDF

SEQ ID NO: 15972 - protein, 20 aa, Artificial Sequence
  Synthetic polypeptide representing artificial human antibody CDR-H3 region
ARDGRLHLGELSLYWPSFDY

SEQ ID NO: 15973 - protein, 15 aa, Artificial Sequence
  Synthetic polypeptide representing artificial human antibody CDR-H3 region
AKVRVVITPNDGFDI

SEQ ID NO: 15974 - protein, 17 aa, Artificial Sequence
  Synthetic polypeptide representing artificial human antibody CDR-H3 region
VRSHYEGSESFRDAFDI

SEQ ID NO: 15975 - protein, 15 aa, Artificial Sequence
  Synthetic polypeptide representing artificial human antibody CDR-H3 region
ARDGPDYGDYVNFDY

SEQ ID NO: 15976 - protein, 19 aa, Artificial Sequence
  Synthetic polypeptide representing artificial human antibody CDR-H3 region
AKRRGNLVRGRVTGDGMDV

SEQ ID NO: 15977 - protein, 11 aa, Artificial Sequence
  Synthetic polypeptide representing artificial human antibody CDR-H3 region
ARDGQWFDLDY

SEQ ID NO: 15978 - protein, 17 aa, Artificial Sequence
  Synthetic polypeptide representing artificial human antibody CDR-H3 region
VKDLRGGIADRDSVFHL

SEQ ID NO: 15979 - protein, 18 aa, Artificial Sequence
  Synthetic polypeptide representing artificial human antibody CDR-H3 region
AKGLTGLRYSPSPQYFQH

SEQ ID NO: 15980 - protein, 13 aa, Artificial Sequence
  Synthetic polypeptide representing artificial human antibody CDR-H3 region
TTGLAASTYYVDY

SEQ ID NO: 15981 - protein, 11 aa, Artificial Sequence
  Synthetic polypeptide representing artificial human antibody CDR-H3 region
VPRYTNHWFDK

SEQ ID NO: 15982 - protein, 12 aa, Artificial Sequence
  Synthetic polypeptide representing artificial human antibody CDR-H3 region
ARDGQYGWAFDI

SEQ ID NO: 15983 - protein, 14 aa, Artificial Sequence
  Synthetic polypeptide representing artificial human antibody CDR-H3 region
ARDLGRRFFYGMEI

SEQ ID NO: 15984 - protein, 13 aa, Artificial Sequence
  Synthetic polypeptide representing artificial human antibody CDR-H3 region
AQGVGGWNPWFDP

SEQ ID NO: 15985 - protein, 15 aa, Artificial Sequence
  Synthetic polypeptide representing artificial human antibody CDR-H3 region
ARDVYSSTWDYYFDY

SEQ ID NO: 15986 - protein, 16 aa, Artificial Sequence
  Synthetic polypeptide representing artificial human antibody CDR-H3 region
VRDRTNSYGLGSNAVY

SEQ ID NO: 15987 - protein, 17 aa, Artificial Sequence
  Synthetic polypeptide representing artificial human antibody CDR-H3 region
TRSHYSGSESYRDSLDI

SEQ ID NO: 15988 - protein, 10 aa, Artificial Sequence
  Synthetic polypeptide representing artificial human antibody CDR-H3 region
ARGGRYQFDS

SEQ ID NO: 15989 - protein, 12 aa, Artificial Sequence
  Synthetic polypeptide representing artificial human antibody CDR-H3 region
ARDGRYGWAFDM

SEQ ID NO: 15990 - protein, 17 aa, Artificial Sequence
  Synthetic polypeptide representing artificial human antibody CDR-H3 region
AKQSGPGNFIVYWYFDL

SEQ ID NO: 15991 - protein, 14 aa, Artificial Sequence
  Synthetic polypeptide representing artificial human antibody CDR-H3 region
ARGGSAPPGNWFAA

SEQ ID NO: 15992 - protein, 17 aa, Artificial Sequence
  Synthetic polypeptide representing artificial human antibody CDR-H3 region
QSGPTGTPNYYYYDMDV

SEQ ID NO: 15993 - protein, 14 aa, Artificial Sequence
  Synthetic polypeptide representing artificial human antibody CDR-H3 region
ARESRDVAAAGYDF

SEQ ID NO: 15994 - protein, 17 aa, Artificial Sequence
  Synthetic polypeptide representing artificial human antibody CDR-H3 region
ARGCYSSGCGRLKEFDY

SEQ ID NO: 15995 - protein, 10 aa, Artificial Sequence
  Synthetic polypeptide representing artificial human antibody CDR-H3 region
ARLESGFLDL

SEQ ID NO: 15996 - protein, 18 aa, Artificial Sequence
  Synthetic polypeptide representing artificial human antibody CDR-H3 region
ARGSYGDSLRPVGDYFDS

SEQ ID NO: 15997 - protein, 17 aa, Artificial Sequence
  Synthetic polypeptide representing artificial human antibody CDR-H3 region
ARSHYVGSLNFRDALDI

SEQ ID NO: 15998 - protein, 14 aa, Artificial Sequence
  Synthetic polypeptide representing artificial human antibody CDR-H3 region
ARAKSGWRPYAVDV

SEQ ID NO: 15999 - protein, 12 aa, Artificial Sequence
  Synthetic polypeptide representing artificial human antibody CDR-H3 region
AKTHISGWCFDY

SEQ ID NO: 16000 - protein, 14 aa, Artificial Sequence
  Synthetic polypeptide representing artificial human antibody CDR-H3 region
ARGGAAPPGNWFDR

SEQ ID NO: 16001 - protein, 11 aa, Artificial Sequence
  Synthetic polypeptide representing artificial human antibody CDR-H3 region
GRDGMVTGIDN

SEQ ID NO: 16002 - protein, 15 aa, Artificial Sequence
  Synthetic polypeptide representing artificial human antibody CDR-H3 region
ARERGTYSPLGAFDI

SEQ ID NO: 16003 - protein, 15 aa, Artificial Sequence
  Synthetic polypeptide representing artificial human antibody CDR-H3 region
ARFCGTYNSPCGFDS

SEQ ID NO: 16004 - protein, 17 aa, Artificial Sequence
  Synthetic polypeptide representing artificial human antibody CDR-H3 region
ARSHYSGSESYRDAFDF

SEQ ID NO: 16005 - protein, 18 aa, Artificial Sequence
  Synthetic polypeptide representing artificial human antibody CDR-H3 region
ARHIGLTKDSSSWYKIDY

SEQ ID NO: 16006 - protein, 11 aa, Artificial Sequence
  Synthetic polypeptide representing artificial human antibody CDR-H3 region
ARAIRYNWFDP

SEQ ID NO: 16007 - protein, 18 aa, Artificial Sequence
  Synthetic polypeptide representing artificial human antibody CDR-H3 region
TTDRVGTNCGGDCYQFQH

SEQ ID NO: 16008 - protein, 11 aa, Artificial Sequence
  Synthetic polypeptide representing artificial human antibody CDR-H3 region
AKIPPRGPFAI

SEQ ID NO: 16009 - protein, 15 aa, Artificial Sequence
  Synthetic polypeptide representing artificial human antibody CDR-H3 region
AKGATGWYVSHYYDF

SEQ ID NO: 16010 - protein, 15 aa, Artificial Sequence
  Synthetic polypeptide representing artificial human antibody CDR-H3 region
AKLRAVVTVIEAFDF

SEQ ID NO: 16011 - protein, 24 aa, Artificial Sequence
  Synthetic polypeptide representing artificial human antibody CDR-H3 region
ARGSGSAYYDFWSGYSHHIAPFDY

SEQ ID NO: 16012 - protein, 13 aa, Artificial Sequence
  Synthetic polypeptide representing artificial human antibody CDR-H3 region
ARERELLTKGLDV

SEQ ID NO: 16013 - protein, 10 aa, Artificial Sequence
  Synthetic polypeptide representing artificial human antibody CDR-H3 region
ARDAEGGFDP

SEQ ID NO: 16014 - protein, 19 aa, Artificial Sequence
  Synthetic polypeptide representing artificial human antibody CDR-H3 region
VLGPYYQHNSGQRVGASDV

SEQ ID NO: 16015 - protein, 15 aa, Artificial Sequence
  Synthetic polypeptide representing artificial human antibody CDR-H3 region
ARVCGSYNSPCGFDS

SEQ ID NO: 16016 - protein, 13 aa, Artificial Sequence
  Synthetic polypeptide representing artificial human antibody CDR-H3 region
ARGNRIGGTSGHY

SEQ ID NO: 16017 - protein, 19 aa, Artificial Sequence
  Synthetic polypeptide representing artificial human antibody CDR-H3 region
ARDGGCFTSSSCYGYGMDV

SEQ ID NO: 16018 - protein, 20 aa, Artificial Sequence
  Synthetic polypeptide representing artificial human antibody CDR-H3 region
ARQARDRSIAARPFSGGFDY

SEQ ID NO: 16019 - protein, 22 aa, Artificial Sequence
  Synthetic polypeptide representing artificial human antibody CDR-H3 region
ARVKGSYYDFWSGRYRVYGMDV

SEQ ID NO: 16020 - protein, 17 aa, Artificial Sequence
  Synthetic polypeptide representing artificial human antibody CDR-H3 region
ARSHYVGSESYRDALDI

SEQ ID NO: 16021 - protein, 17 aa, Artificial Sequence
  Synthetic polypeptide representing artificial human antibody CDR-H3 region
AKDLPRPGNAYYFANDY

SEQ ID NO: 16022 - protein, 15 aa, Artificial Sequence
  Synthetic polypeptide representing artificial human antibody CDR-H3 region
TKACAGGSRCYLIDF

SEQ ID NO: 16023 - protein, 18 aa, Artificial Sequence
  Synthetic polypeptide representing artificial human antibody CDR-H3 region
AKARAYSRSSVFFFVNSH

SEQ ID NO: 16024 - protein, 12 aa, Artificial Sequence
  Synthetic polypeptide representing artificial human antibody CDR-H3 region
ARDGHYGWAFDI

SEQ ID NO: 16025 - protein, 15 aa, Artificial Sequence
  Synthetic polypeptide representing artificial human antibody CDR-H3 region
ARGPWISVWQGGFDY

SEQ ID NO: 16026 - protein, 16 aa, Artificial Sequence
  Synthetic polypeptide representing artificial human antibody CDR-H3 region
AKGGRDGGGPYTYFDY

SEQ ID NO: 16027 - protein, 18 aa, Artificial Sequence
  Synthetic polypeptide representing artificial human antibody CDR-H3 region
TTDRVGTNCDGYCYQFQH

SEQ ID NO: 16028 - protein, 13 aa, Artificial Sequence
  Synthetic polypeptide representing artificial human antibody CDR-H3 region
ARDPKTLRFGVDV

SEQ ID NO: 16029 - protein, 11 aa, Artificial Sequence
  Synthetic polypeptide representing artificial human antibody CDR-H3 region
VPRYTNHWFDK

SEQ ID NO: 16030 - protein, 18 aa, Artificial Sequence
  Synthetic polypeptide representing artificial human antibody CDR-H3 region
ARDRGPWSIAASGTHFDF

SEQ ID NO: 16031 - protein, 13 aa, Artificial Sequence
  Synthetic polypeptide representing artificial human antibody CDR-H3 region
AKAITIFGYYLDF

SEQ ID NO: 16032 - protein, 23 aa, Artificial Sequence
  Synthetic polypeptide representing artificial human antibody CDR-H3 region
AKDAEWGTIFGVVIISPGNAFDI

SEQ ID NO: 16033 - protein, 19 aa, Artificial Sequence
  Synthetic polypeptide representing artificial human antibody CDR-H3 region
AREYPFYSGSWYGGHVFDI

SEQ ID NO: 16034 - protein, 18 aa, Artificial Sequence
  Synthetic polypeptide representing artificial human antibody CDR-H3 region
TTDRGMRGGEYHYYGMDV

SEQ ID NO: 16035 - protein, 14 aa, Artificial Sequence
  Synthetic polypeptide representing artificial human antibody CDR-H3 region
ARHVGSNWYWAFDY

SEQ ID NO: 16036 - protein, 17 aa, Artificial Sequence
  Synthetic polypeptide representing artificial human antibody CDR-H3 region
ARHGRPGIVGGTYYFEY

SEQ ID NO: 16037 - protein, 20 aa, Artificial Sequence
  Synthetic polypeptide representing artificial human antibody CDR-H3 region
ATDRRPGVCRDTCYNWFPDL

SEQ ID NO: 16038 - protein, 16 aa, Artificial Sequence
  Synthetic polypeptide representing artificial human antibody CDR-H3 region
ARAEPIVATTIYYYDY

SEQ ID NO: 16039 - protein, 22 aa, Artificial Sequence
  Synthetic polypeptide representing artificial human antibody CDR-H3 region
ARGLHDNSGRYYDYYYSYGLDV

SEQ ID NO: 16040 - protein, 10 aa, Artificial Sequence
  Synthetic polypeptide representing artificial human antibody CDR-H3 region
TMSREALFDH

SEQ ID NO: 16041 - protein, 13 aa, Artificial Sequence
  Synthetic polypeptide representing artificial human antibody CDR-H3 region
VGERDRNSYRFDY

SEQ ID NO: 16042 - protein, 20 aa, Artificial Sequence
  Synthetic polypeptide representing artificial human antibody CDR-H3 region
STSPLFDWTLYASFYWYLEV

SEQ ID NO: 16043 - protein, 10 aa, Artificial Sequence
  Synthetic polypeptide representing artificial human antibody CDR-H3 region
ATSRNWYLES

SEQ ID NO: 16044 - protein, 12 aa, Artificial Sequence
  Synthetic polypeptide representing artificial human antibody CDR-H3 region
VRSPSDIYGMDV

SEQ ID NO: 16045 - protein, 15 aa, Artificial Sequence
  Synthetic polypeptide representing artificial human antibody CDR-H3 region
ARSLSLLWFGENFDY

SEQ ID NO: 16046 - protein, 14 aa, Artificial Sequence
  Synthetic polypeptide representing artificial human antibody CDR-H3 region
AKDDTIAGADAFDI

SEQ ID NO: 16047 - protein, 14 aa, Artificial Sequence
  Synthetic polypeptide representing artificial human antibody CDR-H3 region
AKDIEGGKNGGYDE

SEQ ID NO: 16048 - protein, 21 aa, Artificial Sequence
  Synthetic polypeptide representing artificial human antibody CDR-H3 region
GKDEEQCTGGSCFSAYYALDV

SEQ ID NO: 16049 - protein, 20 aa, Artificial Sequence
  Synthetic polypeptide representing artificial human antibody CDR-H3 region
ARGSSGNPFCSGDCPLYFDS

SEQ ID NO: 16050 - protein, 9 aa, Artificial Sequence
  Synthetic polypeptide representing artificial human antibody CDR-H3 region
ANSRSSWLY

SEQ ID NO: 16051 - protein, 20 aa, Artificial Sequence
  Synthetic polypeptide representing artificial human antibody CDR-H3 region
ARAQSIAARQWFRYYYFMDV

SEQ ID NO: 16052 - protein, 16 aa, Artificial Sequence
  Synthetic polypeptide representing artificial human antibody CDR-H3 region
ARDRGRTSDDYYGMDV

SEQ ID NO: 16053 - protein, 12 aa, Artificial Sequence
  Synthetic polypeptide representing artificial human antibody CDR-H3 region
ARDPIGEDGLDV

SEQ ID NO: 16054 - protein, 19 aa, Artificial Sequence
  Synthetic polypeptide representing artificial human antibody CDR-H3 region
ARAGYSSSWYSPPVHWFDP

SEQ ID NO: 16055 - protein, 22 aa, Artificial Sequence
  Synthetic polypeptide representing artificial human antibody CDR-H3 region
ARDRGEYQLLIRPAAYYYGMDV

SEQ ID NO: 16056 - protein, 17 aa, Artificial Sequence
  Synthetic polypeptide representing artificial human antibody CDR-H3 region
AKDRDGSGWYGRNFFDG

SEQ ID NO: 16057 - protein, 15 aa, Artificial Sequence
  Synthetic polypeptide representing artificial human antibody CDR-H3 region
AKDGHNWNLFRYFDL

SEQ ID NO: 16058 - protein, 14 aa, Artificial Sequence
  Synthetic polypeptide representing artificial human antibody CDR-H3 region
VREGRGSIASFGHH

SEQ ID NO: 16059 - protein, 15 aa, Artificial Sequence
  Synthetic polypeptide representing artificial human antibody CDR-H3 region
ATLVLPAAGGYYFDY

SEQ ID NO: 16060 - protein, 18 aa, Artificial Sequence
  Synthetic polypeptide representing artificial human antibody CDR-H3 region
ARDWNSGYIFYYYYGMDV

SEQ ID NO: 16061 - protein, 18 aa, Artificial Sequence
  Synthetic polypeptide representing artificial human antibody CDR-H3 region
ARTPYSSSSGYYYYGMDV

SEQ ID NO: 16062 - protein, 18 aa, Artificial Sequence
  Synthetic polypeptide representing artificial human antibody CDR-H3 region
TRGGYCSTTTCDWVISDF

SEQ ID NO: 16063 - protein, 14 aa, Artificial Sequence
  Synthetic polypeptide representing artificial human antibody CDR-H3 region
VRDEAATGSNEYDV

SEQ ID NO: 16064 - protein, 23 aa, Artificial Sequence
  Synthetic polypeptide representing artificial human antibody CDR-H3 region
ARDLALTTIFGVVIIDYYYGMDV

SEQ ID NO: 16065 - protein, 18 aa, Artificial Sequence
  Synthetic polypeptide representing artificial human antibody CDR-H3 region
ARAPFHYDFWSGPNWFDP

SEQ ID NO: 16066 - protein, 15 aa, Artificial Sequence
  Synthetic polypeptide representing artificial human antibody CDR-H3 region
ARGDGYVDNSGELDY

SEQ ID NO: 16067 - protein, 18 aa, Artificial Sequence
  Synthetic polypeptide representing artificial human antibody CDR-H3 region
ARNYYGSGNYYKPYAFDI

SEQ ID NO: 16068 - protein, 18 aa, Artificial Sequence
  Synthetic polypeptide representing artificial human antibody CDR-H3 region
ASHPAAADTTYYYYGMDV

SEQ ID NO: 16069 - protein, 21 aa, Artificial Sequence
  Synthetic polypeptide representing artificial human antibody CDR-H3 region
ARIPVTFGELLGDYYYYGMDV

SEQ ID NO: 16070 - protein, 21 aa, Artificial Sequence
  Synthetic polypeptide representing artificial human antibody CDR-H3 region
AKDQIRGYSSGWTYYYYGMDV

SEQ ID NO: 16071 - protein, 15 aa, Artificial Sequence
  Synthetic polypeptide representing artificial human antibody CDR-H3 region
ARDQPTGRGYGLFDF

SEQ ID NO: 16072 - protein, 15 aa, Artificial Sequence
  Synthetic polypeptide representing artificial human antibody CDR-H3 region
ARELAAIFGSYGMDV

SEQ ID NO: 16073 - protein, 20 aa, Artificial Sequence
  Synthetic polypeptide representing artificial human antibody CDR-H3 region
AKERAYYYDSGGYRSHGLDV

SEQ ID NO: 16074 - protein, 13 aa, Artificial Sequence
  Synthetic polypeptide representing artificial human antibody CDR-H3 region
ARGWSSLLYGMDV

SEQ ID NO: 16075 - protein, 15 aa, Artificial Sequence
  Synthetic polypeptide representing artificial human antibody CDR-H3 region
ARGPTWSGGPYYFDY

SEQ ID NO: 16076 - protein, 19 aa, Artificial Sequence
  Synthetic polypeptide representing artificial human antibody CDR-H3 region
ARQRIYCSGGSCYSNWFDP

SEQ ID NO: 16077 - protein, 21 aa, Artificial Sequence
  Synthetic polypeptide representing artificial human antibody CDR-H3 region
AKLMNLGTIHPDGYYFYALDV

SEQ ID NO: 16078 - protein, 18 aa, Artificial Sequence
  Synthetic polypeptide representing artificial human antibody CDR-H3 region
AKTTAIFHISVAGRALDY

SEQ ID NO: 16079 - protein, 11 aa, Artificial Sequence
  Synthetic polypeptide representing artificial human antibody CDR-H3 region
VRSGDYYNDAL

SEQ ID NO: 16080 - protein, 10 aa, Artificial Sequence
  Synthetic polypeptide representing artificial human antibody CDR-H3 region
ARDGGYSADY

SEQ ID NO: 16081 - protein, 21 aa, Artificial Sequence
  Synthetic polypeptide representing artificial human antibody CDR-H3 region
ARQGVYFDWLLSPIPGPGMDV

SEQ ID NO: 16082 - protein, 13 aa, Artificial Sequence
  Synthetic polypeptide representing artificial human antibody CDR-H3 region
ARTGSGNYIPLDY

SEQ ID NO: 16083 - protein, 15 aa, Artificial Sequence
  Synthetic polypeptide representing artificial human antibody CDR-H3 region
ARNGGSGSYLNWFDP

SEQ ID NO: 16084 - protein, 21 aa, Artificial Sequence
  Synthetic polypeptide representing artificial human antibody CDR-H3 region
AKDQIRGYSSGWTYYYYGMDV

SEQ ID NO: 16085 - protein, 20 aa, Artificial Sequence
  Synthetic polypeptide representing artificial human antibody CDR-H3 region
ARERRITYDFWSTYPDAFDI

SEQ ID NO: 16086 - protein, 12 aa, Artificial Sequence
  Synthetic polypeptide representing artificial human antibody CDR-H3 region
ARNSGFGDGLDV

SEQ ID NO: 16087 - protein, 9 aa, Artificial Sequence
  Synthetic polypeptide representing artificial human antibody CDR-H3 region
ARETGAFDY

SEQ ID NO: 16088 - protein, 17 aa, Artificial Sequence
  Synthetic polypeptide representing artificial human antibody CDR-H3 region
ARALSHYYGRGGYLCDY

SEQ ID NO: 16089 - protein, 8 aa, Artificial Sequence
  Synthetic polypeptide representing artificial human antibody CDR-H3 region
TGNWNCDY

SEQ ID NO: 16090 - protein, 22 aa, Artificial Sequence
  Synthetic polypeptide representing artificial human antibody CDR-H3 region
ARPVGYYYGSGSYVRPRTSMDV

SEQ ID NO: 16091 - protein, 23 aa, Artificial Sequence
  Synthetic polypeptide representing artificial human antibody CDR-H3 region
ARGAGGALAGVLVTVYYYYGVDV

SEQ ID NO: 16092 - protein, 23 aa, Artificial Sequence
  Synthetic polypeptide representing artificial human antibody CDR-H3 region
ARESGESYESRQLTFTEPGAFDI

SEQ ID NO: 16093 - protein, 14 aa, Artificial Sequence
  Synthetic polypeptide representing artificial human antibody CDR-H3 region
ATDGIYSNPGWFDP

SEQ ID NO: 16094 - protein, 17 aa, Artificial Sequence
  Synthetic polypeptide representing artificial human antibody CDR-H3 region
ARAPGVPFPPAIAAFDF

SEQ ID NO: 16095 - protein, 9 aa, Artificial Sequence
  Synthetic polypeptide representing artificial human antibody CDR-H3 region
VAWGGSDAY

SEQ ID NO: 16096 - protein, 16 aa, Artificial Sequence
  Synthetic polypeptide representing artificial human antibody CDR-H3 region
AKAAIVVVVAATELDY

SEQ ID NO: 16097 - protein, 16 aa, Artificial Sequence
  Synthetic polypeptide representing artificial human antibody CDR-H3 region
ARVGDVARTVNNWLDP

SEQ ID NO: 16098 - protein, 13 aa, Artificial Sequence
  Synthetic polypeptide representing artificial human antibody CDR-H3 region
ARDGVLFGDLGDY

SEQ ID NO: 16099 - protein, 14 aa, Artificial Sequence
  Synthetic polypeptide representing artificial human antibody CDR-H3 region
AGSTKSDWSWHFDL

SEQ ID NO: 16100 - protein, 14 aa, Artificial Sequence
  Synthetic polypeptide representing artificial human antibody CDR-H3 region
ARGGHFGGTEGFDY

SEQ ID NO: 16101 - protein, 18 aa, Artificial Sequence
  Synthetic polypeptide representing artificial human antibody CDR-H3 region
ARGGPQYQVRLRPIFFGL

SEQ ID NO: 16102 - protein, 15 aa, Artificial Sequence
  Synthetic polypeptide representing artificial human antibody CDR-H3 region
ASRLGDCRGTSCPIY

SEQ ID NO: 16103 - protein, 14 aa, Artificial Sequence
  Synthetic polypeptide representing artificial human antibody CDR-H3 region
AHSKYYYDWSWFDP

SEQ ID NO: 16104 - protein, 20 aa, Artificial Sequence
  Synthetic polypeptide representing artificial human antibody CDR-H3 region
ARNEDRVTILVLSRHYGMDV

SEQ ID NO: 16105 - protein, 13 aa, Artificial Sequence
  Synthetic polypeptide representing artificial human antibody CDR-H3 region
AKEFDYYYYGMDV

SEQ ID NO: 16106 - protein, 19 aa, Artificial Sequence
  Synthetic polypeptide representing artificial human antibody CDR-H3 region
ARSSPREYSSGLEVAWFDS

SEQ ID NO: 16107 - protein, 15 aa, Artificial Sequence
  Synthetic polypeptide representing artificial human antibody CDR-H3 region
ARRFGDYQYGYYFDY

SEQ ID NO: 16108 - protein, 22 aa, Artificial Sequence
  Synthetic polypeptide representing artificial human antibody CDR-H3 region
ARRPLQGISLFGVVTYNNWFDP

SEQ ID NO: 16109 - protein, 13 aa, Artificial Sequence
  Synthetic polypeptide representing artificial human antibody CDR-H3 region
ARRIAAAGTAVGY

SEQ ID NO: 16110 - protein, 10 aa, Artificial Sequence
  Synthetic polypeptide representing artificial human antibody CDR-H3 region
AVGEWELLDY

SEQ ID NO: 16111 - protein, 11 aa, Artificial Sequence
  Synthetic polypeptide representing artificial human antibody CDR-H3 region
ARDYDSSSLDY

SEQ ID NO: 16112 - protein, 18 aa, Artificial Sequence
  Synthetic polypeptide representing artificial human antibody CDR-H3 region
AKEGGGYSYGSDGETGAV

SEQ ID NO: 16113 - protein, 20 aa, Artificial Sequence
  Synthetic polypeptide representing artificial human antibody CDR-H3 region
AREGDDGDFERGFFYYAMDV

SEQ ID NO: 16114 - protein, 21 aa, Artificial Sequence
  Synthetic polypeptide representing artificial human antibody CDR-H3 region
ARRSGQQLVSKGSYYYYGMDV

SEQ ID NO: 16115 - protein, 19 aa, Artificial Sequence
  Synthetic polypeptide representing artificial human antibody CDR-H3 region
ARENCVKPSRDYHYYGMDV

SEQ ID NO: 16116 - protein, 13 aa, Artificial Sequence
  Synthetic polypeptide representing artificial human antibody CDR-H3 region
ARGASVGDFYFDY

SEQ ID NO: 16117 - protein, 22 aa, Artificial Sequence
  Synthetic polypeptide representing artificial human antibody CDR-H3 region
AKDHQYLYSATWYRGSALGFDS

SEQ ID NO: 16118 - protein, 11 aa, Artificial Sequence
  Synthetic polypeptide representing artificial human antibody CDR-H3 region
ARDPAFGALDF

SEQ ID NO: 16119 - protein, 13 aa, Artificial Sequence
  Synthetic polypeptide representing artificial human antibody CDR-H3 region
ARALIGERVAFAP

SEQ ID NO: 16120 - protein, 11 aa, Artificial Sequence
  Synthetic polypeptide representing artificial human antibody CDR-H3 region
VRDGGRGLFDC

SEQ ID NO: 16121 - protein, 17 aa, Artificial Sequence
  Synthetic polypeptide representing artificial human antibody CDR-H3 region
AKDVNGLRDGNQYAADH

SEQ ID NO: 16122 - protein, 17 aa, Artificial Sequence
  Synthetic polypeptide representing artificial human antibody CDR-H3 region
ARGSNYYDTSGEDYLDP

SEQ ID NO: 16123 - protein, 10 aa, Artificial Sequence
  Synthetic polypeptide representing artificial human antibody CDR-H3 region
ARHPNTAIDF

SEQ ID NO: 16124 - protein, 12 aa, Artificial Sequence
  Synthetic polypeptide representing artificial human antibody CDR-H3 region
ARVVPVGWYCDL

SEQ ID NO: 16125 - protein, 13 aa, Artificial Sequence
  Synthetic polypeptide representing artificial human antibody CDR-H3 region
AKTGLPGPLAFDI

SEQ ID NO: 16126 - protein, 11 aa, Artificial Sequence
  Synthetic polypeptide representing artificial human antibody CDR-H3 region
ARDYYYDSSGY

SEQ ID NO: 16127 - protein, 15 aa, Artificial Sequence
  Synthetic polypeptide representing artificial human antibody CDR-H3 region
AKGSSGWYQSYYFDY

SEQ ID NO: 16128 - protein, 16 aa, Artificial Sequence
  Synthetic polypeptide representing artificial human antibody CDR-H3 region
ARGAPRVWQWLDYFDY

SEQ ID NO: 16129 - protein, 14 aa, Artificial Sequence
  Synthetic polypeptide representing artificial human antibody CDR-H3 region
AKTPSGNYEAYYQN

SEQ ID NO: 16130 - protein, 10 aa, Artificial Sequence
  Synthetic polypeptide representing artificial human antibody CDR-H3 region
ASLQGSAPRA

SEQ ID NO: 16131 - protein, 19 aa, Artificial Sequence
  Synthetic polypeptide representing artificial human antibody CDR-H3 region
ARRSSIGLKTNGRLRVFDT

SEQ ID NO: 16132 - protein, 10 aa, Artificial Sequence
  Synthetic polypeptide representing artificial human antibody CDR-H3 region
ARVSFGDYAV

SEQ ID NO: 16133 - protein, 15 aa, Artificial Sequence
  Synthetic polypeptide representing artificial human antibody CDR-H3 region
VKDDDASTDWYAADS

SEQ ID NO: 16134 - protein, 12 aa, Artificial Sequence
  Synthetic polypeptide representing artificial human antibody CDR-H3 region
ARGASPRSRTDY

SEQ ID NO: 16135 - protein, 15 aa, Artificial Sequence
  Synthetic polypeptide representing artificial human antibody CDR-H3 region
AKGSSGWYMSYYFDY

SEQ ID NO: 16136 - protein, 18 aa, Artificial Sequence
  Synthetic polypeptide representing artificial human antibody CDR-H3 region
ARGGAPYSVGWDDNWFDP

SEQ ID NO: 16137 - protein, 15 aa, Artificial Sequence
  Synthetic polypeptide representing artificial human antibody CDR-H3 region
AKGSSGWYRNYYFDY

SEQ ID NO: 16138 - protein, 15 aa, Artificial Sequence
  Synthetic polypeptide representing artificial human antibody CDR-H3 region
ARRGGGGYPYYYFDL

SEQ ID NO: 16139 - protein, 15 aa, Artificial Sequence
  Synthetic polypeptide representing artificial human antibody CDR-H3 region
ARGSSGWYSAYYFDY

SEQ ID NO: 16140 - protein, 12 aa, Artificial Sequence
  Synthetic polypeptide representing artificial human antibody CDR-H3 region
VRGASGIGVTRY

SEQ ID NO: 16141 - protein, 14 aa, Artificial Sequence
  Synthetic polypeptide representing artificial human antibody CDR-H3 region
AKSPVSGYYNYFDY

SEQ ID NO: 16142 - protein, 23 aa, Artificial Sequence
  Synthetic polypeptide representing artificial human antibody CDR-H3 region
ARWEREYRVFEYNKTPIGWYFDL

SEQ ID NO: 16143 - protein, 29 aa, Artificial Sequence
  Synthetic polypeptide representing artificial human antibody CDR-H3 region
ARGGTPTSYYDILTGHYPAPPDFYYGMDV

SEQ ID NO: 16144 - protein, 16 aa, Artificial Sequence
  Synthetic polypeptide representing artificial human antibody CDR-H3 region
ARLSLDYYDSSGYHDY

SEQ ID NO: 16145 - protein, 13 aa, Artificial Sequence
  Synthetic polypeptide representing artificial human antibody CDR-H3 region
AKDQALWFDTFDH

SEQ ID NO: 16146 - protein, 10 aa, Artificial Sequence
  Synthetic polypeptide representing artificial human antibody CDR-H3 region
TRGGGWTTEY

SEQ ID NO: 16147 - protein, 13 aa, Artificial Sequence
  Synthetic polypeptide representing artificial human antibody CDR-H3 region
AKATNVYGFYFDF

SEQ ID NO: 16148 - protein, 10 aa, Artificial Sequence
  Synthetic polypeptide representing artificial human antibody CDR-H3 region
VGDRAYAFDI

SEQ ID NO: 16149 - protein, 13 aa, Artificial Sequence
  Synthetic polypeptide representing artificial human antibody CDR-H3 region
SRVEAAPNNWFDP

SEQ ID NO: 16150 - protein, 15 aa, Artificial Sequence
  Synthetic polypeptide representing artificial human antibody CDR-H3 region
AKGSSGWYQSHVFDM

SEQ ID NO: 16151 - protein, 11 aa, Artificial Sequence
  Synthetic polypeptide representing artificial human antibody CDR-H3 region
TRGLADWYFDL

SEQ ID NO: 16152 - protein, 16 aa, Artificial Sequence
  Synthetic polypeptide representing artificial human antibody CDR-H3 region
ARVVNANYPPNNYFDA

SEQ ID NO: 16153 - protein, 12 aa, Artificial Sequence
  Synthetic polypeptide representing artificial human antibody CDR-H3 region
VRARTGTSAFDI

SEQ ID NO: 16154 - protein, 10 aa, Artificial Sequence
  Synthetic polypeptide representing artificial human antibody CDR-H3 region
VRDYAYAFDV

SEQ ID NO: 16155 - protein, 10 aa, Artificial Sequence
  Synthetic polypeptide representing artificial human antibody CDR-H3 region
MTHQGSPHPE

SEQ ID NO: 16156 - protein, 12 aa, Artificial Sequence
  Synthetic polypeptide representing artificial human antibody CDR-H3 region
ARIPGYSSTMDV

SEQ ID NO: 16157 - protein, 18 aa, Artificial Sequence
  Synthetic polypeptide representing artificial human antibody CDR-H3 region
ARDRGYYSDGGWYTLLDY

SEQ ID NO: 16158 - protein, 17 aa, Artificial Sequence
  Synthetic polypeptide representing artificial human antibody CDR-H3 region
VRRNYDVFTGSYLGFDP

SEQ ID NO: 16159 - protein, 13 aa, Artificial Sequence
  Synthetic polypeptide representing artificial human antibody CDR-H3 region
VREFRSGTYYSDY

SEQ ID NO: 16160 - protein, 12 aa, Artificial Sequence
  Synthetic polypeptide representing artificial human antibody CDR-H3 region
ARGASPRSRTDY

SEQ ID NO: 16161 - protein, 17 aa, Artificial Sequence
  Synthetic polypeptide representing artificial human antibody CDR-H3 region
AREGIWYNSGWDEYFQL

SEQ ID NO: 16162 - protein, 6 aa, Artificial Sequence
  Synthetic polypeptide representing artificial human antibody CDR-H3 region
LRPYDY

SEQ ID NO: 16163 - protein, 13 aa, Artificial Sequence
  Synthetic polypeptide representing artificial human antibody CDR-H3 region
ARGVVRNKNWFDP

SEQ ID NO: 16164 - protein, 14 aa, Artificial Sequence
  Synthetic polypeptide representing artificial human antibody CDR-H3 region
ARTDGGNYMAYFDY

SEQ ID NO: 16165 - protein, 11 aa, Artificial Sequence
  Synthetic polypeptide representing artificial human antibody CDR-H3 region
ARYLSRREFDC

SEQ ID NO: 16166 - protein, 16 aa, Artificial Sequence
  Synthetic polypeptide representing artificial human antibody CDR-H3 region
ARHLTGSKSTHDWFDP

SEQ ID NO: 16167 - protein, 14 aa, Artificial Sequence
  Synthetic polypeptide representing artificial human antibody CDR-H3 region
TRESIAPYSFYMDV

SEQ ID NO: 16168 - protein, 13 aa, Artificial Sequence
  Synthetic polypeptide representing artificial human antibody CDR-H3 region
TTRSSSWSASFDH

SEQ ID NO: 16169 - protein, 12 aa, Artificial Sequence
  Synthetic polypeptide representing artificial human antibody CDR-H3 region
ARGPTVTGWFDP

SEQ ID NO: 16170 - protein, 25 aa, Artificial Sequence
  Synthetic polypeptide representing artificial human antibody CDR-H3 region
ARGALVGTTFSWGPKTPGRTSWFDP

SEQ ID NO: 16171 - protein, 16 aa, Artificial Sequence
  Synthetic polypeptide representing artificial human antibody CDR-H3 region
ARVPPTTSGWDHYFDH

SEQ ID NO: 16172 - protein, 13 aa, Artificial Sequence
  Synthetic polypeptide representing artificial human antibody CDR-H3 region
ARKTTSMDYYTEV

SEQ ID NO: 16173 - protein, 21 aa, Artificial Sequence
  Synthetic polypeptide representing artificial human antibody CDR-H3 region
ASKYYDILTGHQVVYYYGMDV

SEQ ID NO: 16174 - protein, 14 aa, Artificial Sequence
  Synthetic polypeptide representing artificial human antibody CDR-H3 region
AREVEGSSADWFDP

SEQ ID NO: 16175 - protein, 17 aa, Artificial Sequence
  Synthetic polypeptide representing artificial human antibody CDR-H3 region
AKDLDGSATWNLDAFDI

SEQ ID NO: 16176 - protein, 5 aa, Artificial Sequence
  Synthetic polypeptide representing artificial human antibody CDR-H3 region
TRSDY

SEQ ID NO: 16177 - protein, 16 aa, Artificial Sequence
  Synthetic polypeptide representing artificial human antibody CDR-H3 region
ARDYYANGEYETIFEY

SEQ ID NO: 16178 - protein, 16 aa, Artificial Sequence
  Synthetic polypeptide representing artificial human antibody CDR-H3 region
ARDYYANGDYETIFEY

SEQ ID NO: 16179 - protein, 16 aa, Artificial Sequence
  Synthetic polypeptide representing artificial human antibody CDR-H3 region
ARAKFDVDGFTPFFDS

SEQ ID NO: 16180 - protein, 12 aa, Artificial Sequence
  Synthetic polypeptide representing artificial human antibody CDR-H3 region
ARASIWGNYFDY

SEQ ID NO: 16181 - protein, 16 aa, Artificial Sequence
  Synthetic polypeptide representing artificial human antibody CDR-H3 region
AKQGYSGAWPEVAFDL

SEQ ID NO: 16182 - protein, 13 aa, Artificial Sequence
  Synthetic polypeptide representing artificial human antibody CDR-H3 region
ATSGSWFRQPFDY

SEQ ID NO: 16183 - protein, 27 aa, Artificial Sequence
  Synthetic polypeptide representing artificial human antibody CDR-H3 region
ASVKGRLEHPRGFCSGGSCYSDWRFDP

SEQ ID NO: 16184 - protein, 15 aa, Artificial Sequence
  Synthetic polypeptide representing artificial human antibody CDR-H3 region
ARDESLTGFRGTLDS

SEQ ID NO: 16185 - protein, 19 aa, Artificial Sequence
  Synthetic polypeptide representing artificial human antibody CDR-H3 region
ARVDATVHCAGGRCAYFDY

SEQ ID NO: 16186 - protein, 16 aa, Artificial Sequence
  Synthetic polypeptide representing artificial human antibody CDR-H3 region
ARDYYVSGDYETIFQH

SEQ ID NO: 16187 - protein, 17 aa, Artificial Sequence
  Synthetic polypeptide representing artificial human antibody CDR-H3 region
AKVPSSSWYSGSRWFDP

SEQ ID NO: 16188 - protein, 14 aa, Artificial Sequence
  Synthetic polypeptide representing artificial human antibody CDR-H3 region
VKDRFYYGSEQTDS

SEQ ID NO: 16189 - protein, 25 aa, Artificial Sequence
  Synthetic polypeptide representing artificial human antibody CDR-H3 region
ARDRPPSTFYSTISGSYYEPDAFDI

SEQ ID NO: 16190 - protein, 18 aa, Artificial Sequence
  Synthetic polypeptide representing artificial human antibody CDR-H3 region
AREGSDIVVPGTIGWFDP

SEQ ID NO: 16191 - protein, 12 aa, Artificial Sequence
  Synthetic polypeptide representing artificial human antibody CDR-H3 region
AKAGVGGGWFDP

SEQ ID NO: 16192 - protein, 11 aa, Artificial Sequence
  Synthetic polypeptide representing artificial human antibody CDR-H3 region
ARDIGGGAFDI

SEQ ID NO: 16193 - protein, 15 aa, Artificial Sequence
  Synthetic polypeptide representing artificial human antibody CDR-H3 region
ARAAGAGTGYNWFDP

SEQ ID NO: 16194 - protein, 14 aa, Artificial Sequence
  Synthetic polypeptide representing artificial human antibody CDR-H3 region
ARDGTTGVLAAFDI

SEQ ID NO: 16195 - protein, 17 aa, Artificial Sequence
  Synthetic polypeptide representing artificial human antibody CDR-H3 region
ARARVTMIVRLVNAFDI

SEQ ID NO: 16196 - protein, 24 aa, Artificial Sequence
  Synthetic polypeptide representing artificial human antibody CDR-H3 region
ARDPRLRFGELFRAPFKYYYGMDV

SEQ ID NO: 16197 - protein, 19 aa, Artificial Sequence
  Synthetic polypeptide representing artificial human antibody CDR-H3 region
ARDFDVWTDEGPDYYGMDV

SEQ ID NO: 16198 - protein, 16 aa, Artificial Sequence
  Synthetic polypeptide representing artificial human antibody CDR-H3 region
ARLRRRDMVRGVNFDY

SEQ ID NO: 16199 - protein, 15 aa, Artificial Sequence
  Synthetic polypeptide representing artificial human antibody CDR-H3 region
AAGGGGYGDSYRMDV

SEQ ID NO: 16200 - protein, 19 aa, Artificial Sequence
  Synthetic polypeptide representing artificial human antibody CDR-H3 region
AKVPTNDFLIGYSSDAFDI

SEQ ID NO: 16201 - protein, 16 aa, Artificial Sequence
  Synthetic polypeptide representing artificial human antibody CDR-H3 region
AKDGDFGGSYSFYFDN

SEQ ID NO: 16202 - protein, 21 aa, Artificial Sequence
  Synthetic polypeptide representing artificial human antibody CDR-H3 region
ARSSYGLREFGGVLPLGDFDY

SEQ ID NO: 16203 - protein, 19 aa, Artificial Sequence
  Synthetic polypeptide representing artificial human antibody CDR-H3 region
ARISRVFYDLWSDGYVLDV

SEQ ID NO: 16204 - protein, 26 aa, Artificial Sequence
  Synthetic polypeptide representing artificial human antibody CDR-H3 region
ARGSMVRGVIYARGPSDPPDYYGMDV

SEQ ID NO: 16205 - protein, 16 aa, Artificial Sequence
  Synthetic polypeptide representing artificial human antibody CDR-H3 region
AREYVVVSAAMGGFDP

SEQ ID NO: 16206 - protein, 20 aa, Artificial Sequence
  Synthetic polypeptide representing artificial human antibody CDR-H3 region
VAATSPTDFLAARGRTAFDV

SEQ ID NO: 16207 - protein, 18 aa, Artificial Sequence
  Synthetic polypeptide representing artificial human antibody CDR-H3 region
ARRRVGYCKGGSCYSWVH

SEQ ID NO: 16208 - protein, 18 aa, Artificial Sequence
  Synthetic polypeptide representing artificial human antibody CDR-H3 region
ARAPRTVVTGDYYYGMDV

SEQ ID NO: 16209 - protein, 12 aa, Artificial Sequence
  Synthetic polypeptide representing artificial human antibody CDR-H3 region
TTDLHDYGDSDY

SEQ ID NO: 16210 - protein, 14 aa, Artificial Sequence
  Synthetic polypeptide representing artificial human antibody CDR-H3 region
TKLPFDYGAYWFDP

SEQ ID NO: 16211 - protein, 19 aa, Artificial Sequence
  Synthetic polypeptide representing artificial human antibody CDR-H3 region
ARIFGSGYLGLVSYHWFDP

SEQ ID NO: 16212 - protein, 11 aa, Artificial Sequence
  Synthetic polypeptide representing artificial human antibody CDR-H3 region
ARGDWFRYFDY

SEQ ID NO: 16213 - protein, 11 aa, Artificial Sequence
  Synthetic polypeptide representing artificial human antibody CDR-H3 region
TTDPGIELRGH

SEQ ID NO: 16214 - protein, 20 aa, Artificial Sequence
  Synthetic polypeptide representing artificial human antibody CDR-H3 region
ARVSDWSCTGGTCYGNWFDP

SEQ ID NO: 16215 - protein, 21 aa, Artificial Sequence
  Synthetic polypeptide representing artificial human antibody CDR-H3 region
ARPIRGGYNYGTRDFYYGMDL

SEQ ID NO: 16216 - protein, 26 aa, Artificial Sequence
  Synthetic polypeptide representing artificial human antibody CDR-H3 region
AKDRGKNYDFWSAYYTGRDYYYGMDV

SEQ ID NO: 16217 - protein, 17 aa, Artificial Sequence
  Synthetic polypeptide representing artificial human antibody CDR-H3 region
TRPRAEGYDSGYFDFEY

SEQ ID NO: 16218 - protein, 16 aa, Artificial Sequence
  Synthetic polypeptide representing artificial human antibody CDR-H3 region
ARDYYAKGDYETIFEY

SEQ ID NO: 16219 - protein, 8 aa, Artificial Sequence
  Synthetic polypeptide representing artificial human antibody CDR-H3 region
ARSPWFDP

SEQ ID NO: 16220 - protein, 13 aa, Artificial Sequence
  Synthetic polypeptide representing artificial human antibody CDR-H3 region
ARLAARPYDAFDI

SEQ ID NO: 16221 - protein, 16 aa, Artificial Sequence
  Synthetic polypeptide representing artificial human antibody CDR-H3 region
ARDSASGTYYMTFFDY

SEQ ID NO: 16222 - protein, 11 aa, Artificial Sequence
  Synthetic polypeptide representing artificial human antibody CDR-H3 region
ARALGTVSRGD

SEQ ID NO: 16223 - protein, 10 aa, Artificial Sequence
  Synthetic polypeptide representing artificial human antibody CDR-H3 region
ARHRDGDVDY

SEQ ID NO: 16224 - protein, 16 aa, Artificial Sequence
  Synthetic polypeptide representing artificial human antibody CDR-H3 region
AKDPYYDFWSGYYYDY

SEQ ID NO: 16225 - protein, 19 aa, Artificial Sequence
  Synthetic polypeptide representing artificial human antibody CDR-H3 region
ARDQWITMIVVAPYDAFDI

SEQ ID NO: 16226 - protein, 21 aa, Artificial Sequence
  Synthetic polypeptide representing artificial human antibody CDR-H3 region
ARGGAQWELLGRPYYYYGMDV

SEQ ID NO: 16227 - protein, 18 aa, Artificial Sequence
  Synthetic polypeptide representing artificial human antibody CDR-H3 region
VKETPMKIFGVGFSCFDP

SEQ ID NO: 16228 - protein, 16 aa, Artificial Sequence
  Synthetic polypeptide representing artificial human antibody CDR-H3 region
ARSARIPITATDAFDI

SEQ ID NO: 16229 - protein, 14 aa, Artificial Sequence
  Synthetic polypeptide representing artificial human antibody CDR-H3 region
AKDSSAYTHTWIDS

SEQ ID NO: 16230 - protein, 24 aa, Artificial Sequence
  Synthetic polypeptide representing artificial human antibody CDR-H3 region
AKDQSSGYSYGSGWGYYYYYGMDV

SEQ ID NO: 16231 - protein, 14 aa, Artificial Sequence
  Synthetic polypeptide representing artificial human antibody CDR-H3 region
AKGWGTLINLPIGF

SEQ ID NO: 16232 - protein, 18 aa, Artificial Sequence
  Synthetic polypeptide representing artificial human antibody CDR-H3 region
GRLIISSGWYQYYYGMDV

SEQ ID NO: 16233 - protein, 19 aa, Artificial Sequence
  Synthetic polypeptide representing artificial human antibody CDR-H3 region
VRDLGSSSRGLYYFHGMDV

SEQ ID NO: 16234 - protein, 11 aa, Artificial Sequence
  Synthetic polypeptide representing artificial human antibody CDR-H3 region
ASYDSSAYLGY

SEQ ID NO: 16235 - protein, 18 aa, Artificial Sequence
  Synthetic polypeptide representing artificial human antibody CDR-H3 region
ARGLCSGGRCDYYFGMDV

SEQ ID NO: 16236 - protein, 11 aa, Artificial Sequence
  Synthetic polypeptide representing artificial human antibody CDR-H3 region
IRGGWGSRFDF

SEQ ID NO: 16237 - protein, 17 aa, Artificial Sequence
  Synthetic polypeptide representing artificial human antibody CDR-H3 region
ARSSYDILTGYSTEFDY

SEQ ID NO: 16238 - protein, 22 aa, Artificial Sequence
  Synthetic polypeptide representing artificial human antibody CDR-H3 region
ARDKAVAGILSRAPNYYYGMDV

SEQ ID NO: 16239 - protein, 22 aa, Artificial Sequence
  Synthetic polypeptide representing artificial human antibody CDR-H3 region
ARGVEWIQLWSRNPKKYNWFDP

SEQ ID NO: 16240 - protein, 27 aa, Artificial Sequence
  Synthetic polypeptide representing artificial human antibody CDR-H3 region
AKGDIVVVPAAISWSRYEREALYYFDY

SEQ ID NO: 16241 - protein, 10 aa, Artificial Sequence
  Synthetic polypeptide representing artificial human antibody CDR-H3 region
ARRGPEAFDY

SEQ ID NO: 16242 - protein, 12 aa, Artificial Sequence
  Synthetic polypeptide representing artificial human antibody CDR-H3 region
AKAGVGGGWFDP

SEQ ID NO: 16243 - protein, 10 aa, Artificial Sequence
  Synthetic polypeptide representing artificial human antibody CDR-H3 region
ARHKGASFDS

SEQ ID NO: 16244 - protein, 22 aa, Artificial Sequence
  Synthetic polypeptide representing artificial human antibody CDR-H3 region
ARDRSPIVVVPALGHWHYGMDV

SEQ ID NO: 16245 - protein, 19 aa, Artificial Sequence
  Synthetic polypeptide representing artificial human antibody CDR-H3 region
TRDLEPSVEGADFAPTHDC

SEQ ID NO: 16246 - protein, 20 aa, Artificial Sequence
  Synthetic polypeptide representing artificial human antibody CDR-H3 region
ARTGWSTDGSGSYRYDAFDI

SEQ ID NO: 16247 - protein, 14 aa, Artificial Sequence
  Synthetic polypeptide representing artificial human antibody CDR-H3 region
ARETPFGGVIVIDN

SEQ ID NO: 16248 - protein, 16 aa, Artificial Sequence
  Synthetic polypeptide representing artificial human antibody CDR-H3 region
ARDYSLNVGGYDSPNY

SEQ ID NO: 16249 - protein, 13 aa, Artificial Sequence
  Synthetic polypeptide representing artificial human antibody CDR-H3 region
ARDYGTVTTYPDY

SEQ ID NO: 16250 - protein, 5 aa, Artificial Sequence
  Synthetic polypeptide representing artificial human antibody CDR-H3 region
TRQDV

SEQ ID NO: 16251 - protein, 11 aa, Artificial Sequence
  Synthetic polypeptide representing artificial human antibody CDR-L3 region
AAWDDRLNGVV

SEQ ID NO: 16252 - protein, 7 aa, Artificial Sequence
  Synthetic polypeptide representing artificial human antibody CDR-L3 region
QQYGSSL

SEQ ID NO: 16253 - protein, 10 aa, Artificial Sequence
  Synthetic polypeptide representing artificial human antibody CDR-L3 region
QQYNSYSPWT

SEQ ID NO: 16254 - protein, 9 aa, Artificial Sequence
  Synthetic polypeptide representing artificial human antibody CDR-L3 region
QQYKNHPIT

SEQ ID NO: 16255 - protein, 10 aa, Artificial Sequence
  Synthetic polypeptide representing artificial human antibody CDR-L3 region
QQYNSYSPYT

SEQ ID NO: 16256 - protein, 10 aa, Artificial Sequence
  Synthetic polypeptide representing artificial human antibody CDR-L3 region
QQYNSYSPWT

SEQ ID NO: 16257 - protein, 8 aa, Artificial Sequence
  Synthetic polypeptide representing artificial human antibody CDR-L3 region
QQYNSYST

SEQ ID NO: 16258 - protein, 11 aa, Artificial Sequence
  Synthetic polypeptide representing artificial human antibody CDR-L3 region
AAWDDRLNGVV

SEQ ID NO: 16259 - protein, 9 aa, Artificial Sequence
  Synthetic polypeptide representing artificial human antibody CDR-L3 region
QQRSNWPLT

SEQ ID NO: 16260 - protein, 9 aa, Artificial Sequence
  Synthetic polypeptide representing artificial human antibody CDR-L3 region
QHYGSSPRT

SEQ ID NO: 16261 - protein, 10 aa, Artificial Sequence
  Synthetic polypeptide representing artificial human antibody CDR-L3 region
CSYAGSYTYV

SEQ ID NO: 16262 - protein, 10 aa, Artificial Sequence
  Synthetic polypeptide representing artificial human antibody CDR-L3 region
CSYAGSYTYV

SEQ ID NO: 16263 - protein, 8 aa, Artificial Sequence
  Synthetic polypeptide representing artificial human antibody CDR-L3 region
MQGTHWRT

SEQ ID NO: 16264 - protein, 9 aa, Artificial Sequence
  Synthetic polypeptide representing artificial human antibody CDR-L3 region
MQALQIALT

SEQ ID NO: 16265 - protein, 9 aa, Artificial Sequence
  Synthetic polypeptide representing artificial human antibody CDR-L3 region
QQSYSTPYT

SEQ ID NO: 16266 - protein, 9 aa, Artificial Sequence
  Synthetic polypeptide representing artificial human antibody CDR-L3 region
QQHSTWPLT

SEQ ID NO: 16267 - protein, 10 aa, Artificial Sequence
  Synthetic polypeptide representing artificial human antibody CDR-L3 region
SSYAGSNNVV

SEQ ID NO: 16268 - protein, 9 aa, Artificial Sequence
  Synthetic polypeptide representing artificial human antibody CDR-L3 region
EAWDSNTVV

SEQ ID NO: 16269 - protein, 10 aa, Artificial Sequence
  Synthetic polypeptide representing artificial human antibody CDR-L3 region
CSYAGSNTWV

SEQ ID NO: 16270 - protein, 11 aa, Artificial Sequence
  Synthetic polypeptide representing artificial human antibody CDR-L3 region
LVWDSSSDHWV

SEQ ID NO: 16271 - protein, 10 aa, Artificial Sequence
  Synthetic polypeptide representing artificial human antibody CDR-L3 region
SSYTSSSTYV

SEQ ID NO: 16272 - protein, 10 aa, Artificial Sequence
  Synthetic polypeptide representing artificial human antibody CDR-L3 region
TSHTIYGTRV

SEQ ID NO: 16273 - protein, 10 aa, Artificial Sequence
  Synthetic polypeptide representing artificial human antibody CDR-L3 region
QQYGSSPRYT

SEQ ID NO: 16274 - protein, 12 aa, Artificial Sequence
  Synthetic polypeptide representing artificial human antibody CDR-L3 region
SSYTSSSTFGWV

SEQ ID NO: 16275 - protein, 9 aa, Artificial Sequence
  Synthetic polypeptide representing artificial human antibody CDR-L3 region
CSYAGSSRI

SEQ ID NO: 16276 - protein, 8 aa, Artificial Sequence
  Synthetic polypeptide representing artificial human antibody CDR-L3 region
QQYGSPWT

SEQ ID NO: 16277 - protein, 9 aa, Artificial Sequence
  Synthetic polypeptide representing artificial human antibody CDR-L3 region
QQSYVTPYT

SEQ ID NO: 16278 - protein, 13 aa, Artificial Sequence
  Synthetic polypeptide representing artificial human antibody CDR-L3 region
GADHGSGSNFLVV

SEQ ID NO: 16279 - protein, 9 aa, Artificial Sequence
  Synthetic polypeptide representing artificial human antibody CDR-L3 region
QQYYSYPLT

SEQ ID NO: 16280 - protein, 9 aa, Artificial Sequence
  Synthetic polypeptide representing artificial human antibody CDR-L3 region
QTWGTGMQM

SEQ ID NO: 16281 - protein, 10 aa, Artificial Sequence
  Synthetic polypeptide representing artificial human antibody CDR-L3 region
QQYGSSPPLT

SEQ ID NO: 16282 - protein, 9 aa, Artificial Sequence
  Synthetic polypeptide representing artificial human antibody CDR-L3 region
LQNNRYPRT

SEQ ID NO: 16283 - protein, 10 aa, Artificial Sequence
  Synthetic polypeptide representing artificial human antibody CDR-L3 region
QQRSNWPPWT

SEQ ID NO: 16284 - protein, 11 aa, Artificial Sequence
  Synthetic polypeptide representing artificial human antibody CDR-L3 region
QSADSSGTFYV

SEQ ID NO: 16285 - protein, 9 aa, Artificial Sequence
  Synthetic polypeptide representing artificial human antibody CDR-L3 region
QKYNSAPWT

SEQ ID NO: 16286 - protein, 10 aa, Artificial Sequence
  Synthetic polypeptide representing artificial human antibody CDR-L3 region
QQFYNFPFFT

SEQ ID NO: 16287 - protein, 10 aa, Artificial Sequence
  Synthetic polypeptide representing artificial human antibody CDR-L3 region
QQYNNWPPYT

SEQ ID NO: 16288 - protein, 9 aa, Artificial Sequence
  Synthetic polypeptide representing artificial human antibody CDR-L3 region
LQHNSYPLT

SEQ ID NO: 16289 - protein, 11 aa, Artificial Sequence
  Synthetic polypeptide representing artificial human antibody CDR-L3 region
QVWDSSSDHGV

SEQ ID NO: 16290 - protein, 10 aa, Artificial Sequence
  Synthetic polypeptide representing artificial human antibody CDR-L3 region
QQYYSTPPYT

SEQ ID NO: 16291 - protein, 10 aa, Artificial Sequence
  Synthetic polypeptide representing artificial human antibody CDR-L3 region
SSYTSSSTYV

SEQ ID NO: 16292 - protein, 10 aa, Artificial Sequence
  Synthetic polypeptide representing artificial human antibody CDR-L3 region
CSYTDRFSYV

SEQ ID NO: 16293 - protein, 10 aa, Artificial Sequence
  Synthetic polypeptide representing artificial human antibody CDR-L3 region
CSFAGSSTYV

SEQ ID NO: 16294 - protein, 9 aa, Artificial Sequence
  Synthetic polypeptide representing artificial human antibody CDR-L3 region
QQYNNWPRT

SEQ ID NO: 16295 - protein, 10 aa, Artificial Sequence
  Synthetic polypeptide representing artificial human antibody CDR-L3 region
NSRDSSGNQV

SEQ ID NO: 16296 - protein, 9 aa, Artificial Sequence
  Synthetic polypeptide representing artificial human antibody CDR-L3 region
MQSIQLPLG

SEQ ID NO: 16297 - protein, 6 aa, Artificial Sequence
  Synthetic polypeptide representing artificial human antibody CDR-L3 region
QRSRGS

SEQ ID NO: 16298 - protein, 11 aa, Artificial Sequence
  Synthetic polypeptide representing artificial human antibody CDR-L3 region
QQYDDWPLGIT

SEQ ID NO: 16299 - protein, 11 aa, Artificial Sequence
  Synthetic polypeptide representing artificial human antibody CDR-L3 region
QSYDSSLSGSV

SEQ ID NO: 16300 - protein, 9 aa, Artificial Sequence
  Synthetic polypeptide representing artificial human antibody CDR-L3 region
QQYYSIPYT

SEQ ID NO: 16301 - protein, 11 aa, Artificial Sequence
  Synthetic polypeptide representing artificial human antibody CDR-L3 region
YSYTSTTNRYV

SEQ ID NO: 16302 - protein, 14 aa, Artificial Sequence
  Synthetic polypeptide representing artificial human antibody CDR-L3 region
AAWDDSLSGRAIWV

SEQ ID NO: 16303 - protein, 11 aa, Artificial Sequence
  Synthetic polypeptide representing artificial human antibody CDR-L3 region
ASWDDSLKGVV

SEQ ID NO: 16304 - protein, 11 aa, Artificial Sequence
  Synthetic polypeptide representing artificial human antibody CDR-L3 region
GTWDSSLSAWV

SEQ ID NO: 16305 - protein, 11 aa, Artificial Sequence
  Synthetic polypeptide representing artificial human antibody CDR-L3 region
NSRDSSGNHWV

SEQ ID NO: 16306 - protein, 10 aa, Artificial Sequence
  Synthetic polypeptide representing artificial human antibody CDR-L3 region
QQYDASALWT

SEQ ID NO: 16307 - protein, 10 aa, Artificial Sequence
  Synthetic polypeptide representing artificial human antibody CDR-L3 region
QQSYSTPRIT

SEQ ID NO: 16308 - protein, 11 aa, Artificial Sequence
  Synthetic polypeptide representing artificial human antibody CDR-L3 region
QSADSSGTLWV

SEQ ID NO: 16309 - protein, 9 aa, Artificial Sequence
  Synthetic polypeptide representing artificial human antibody CDR-L3 region
MQSIQLALT

SEQ ID NO: 16310 - protein, 9 aa, Artificial Sequence
  Synthetic polypeptide representing artificial human antibody CDR-L3 region
QKYNNAPWT

SEQ ID NO: 16311 - protein, 9 aa, Artificial Sequence
  Synthetic polypeptide representing artificial human antibody CDR-L3 region
QAWDSSTVV

SEQ ID NO: 16312 - protein, 11 aa, Artificial Sequence
  Synthetic polypeptide representing artificial human antibody CDR-L3 region
YSTDSSGNHWV

SEQ ID NO: 16313 - protein, 9 aa, Artificial Sequence
  Synthetic polypeptide representing artificial human antibody CDR-L3 region
MQALQTPIT

SEQ ID NO: 16314 - protein, 9 aa, Artificial Sequence
  Synthetic polypeptide representing artificial human antibody CDR-L3 region
MQRIEFPWT

SEQ ID NO: 16315 - protein, 8 aa, Artificial Sequence
  Synthetic polypeptide representing artificial human antibody CDR-L3 region
MQALQPYT

SEQ ID NO: 16316 - protein, 10 aa, Artificial Sequence
  Synthetic polypeptide representing artificial human antibody CDR-L3 region
STFTSSTTLV

SEQ ID NO: 16317 - protein, 9 aa, Artificial Sequence
  Synthetic polypeptide representing artificial human antibody CDR-L3 region
QQYGSSLFT

SEQ ID NO: 16318 - protein, 11 aa, Artificial Sequence
  Synthetic polypeptide representing artificial human antibody CDR-L3 region
LAWDDSLTAWV

SEQ ID NO: 16319 - protein, 9 aa, Artificial Sequence
  Synthetic polypeptide representing artificial human antibody CDR-L3 region
QQYFAPPQT

SEQ ID NO: 16320 - protein, 8 aa, Artificial Sequence
  Synthetic polypeptide representing artificial human antibody CDR-L3 region
QQYNNWYT

SEQ ID NO: 16321 - protein, 11 aa, Artificial Sequence
  Synthetic polypeptide representing artificial human antibody CDR-L3 region
ALWDDSLTGYV

SEQ ID NO: 16322 - protein, 9 aa, Artificial Sequence
  Synthetic polypeptide representing artificial human antibody CDR-L3 region
QQYHDWPLT

SEQ ID NO: 16323 - protein, 10 aa, Artificial Sequence
  Synthetic polypeptide representing artificial human antibody CDR-L3 region
CSYAGSSTFV

SEQ ID NO: 16324 - protein, 12 aa, Artificial Sequence
  Synthetic polypeptide representing artificial human antibody CDR-L3 region
AAWDDSLSGDVV

SEQ ID NO: 16325 - protein, 9 aa, Artificial Sequence
  Synthetic polypeptide representing artificial human antibody CDR-L3 region
QQYDILPIT

SEQ ID NO: 16326 - protein, 10 aa, Artificial Sequence
  Synthetic polypeptide representing artificial human antibody CDR-L3 region
LLSYSGARPV

SEQ ID NO: 16327 - protein, 10 aa, Artificial Sequence
  Synthetic polypeptide representing artificial human antibody CDR-L3 region
QHFYNYPFFT

SEQ ID NO: 16328 - protein, 10 aa, Artificial Sequence
  Synthetic polypeptide representing artificial human antibody CDR-L3 region
MQALQTPRLT

SEQ ID NO: 16329 - protein, 9 aa, Artificial Sequence
  Synthetic polypeptide representing artificial human antibody CDR-L3 region
QTWGTGLWV

SEQ ID NO: 16330 - protein, 9 aa, Artificial Sequence
  Synthetic polypeptide representing artificial human antibody CDR-L3 region
LQHNSYPYT

SEQ ID NO: 16331 - protein, 9 aa, Artificial Sequence
  Synthetic polypeptide representing artificial human antibody CDR-L3 region
MQALQTPLT

SEQ ID NO: 16332 - protein, 9 aa, Artificial Sequence
  Synthetic polypeptide representing artificial human antibody CDR-L3 region
QQSYSTPYT

SEQ ID NO: 16333 - protein, 8 aa, Artificial Sequence
  Synthetic polypeptide representing artificial human antibody CDR-L3 region
QQYNSYWT

SEQ ID NO: 16334 - protein, 9 aa, Artificial Sequence
  Synthetic polypeptide representing artificial human antibody CDR-L3 region
QQSYSTPRA

SEQ ID NO: 16335 - protein, 9 aa, Artificial Sequence
  Synthetic polypeptide representing artificial human antibody CDR-L3 region
MQALQTPYT

SEQ ID NO: 16336 - protein, 10 aa, Artificial Sequence
  Synthetic polypeptide representing artificial human antibody CDR-L3 region
QQRSNWPPLT

SEQ ID NO: 16337 - protein, 10 aa, Artificial Sequence
  Synthetic polypeptide representing artificial human antibody CDR-L3 region
CSYTSSLSYV

SEQ ID NO: 16338 - protein, 11 aa, Artificial Sequence
  Synthetic polypeptide representing artificial human antibody CDR-L3 region
QSADSSGTYVV

SEQ ID NO: 16339 - protein, 10 aa, Artificial Sequence
  Synthetic polypeptide representing artificial human antibody CDR-L3 region
MQGTHWPRLT

SEQ ID NO: 16340 - protein, 10 aa, Artificial Sequence
  Synthetic polypeptide representing artificial human antibody CDR-L3 region
QVWDSSSDYV

SEQ ID NO: 16341 - protein, 9 aa, Artificial Sequence
  Synthetic polypeptide representing artificial human antibody CDR-L3 region
QQGYLFPYT

SEQ ID NO: 16342 - protein, 10 aa, Artificial Sequence
  Synthetic polypeptide representing artificial human antibody CDR-L3 region
WSYAGGSDWV

SEQ ID NO: 16343 - protein, 9 aa, Artificial Sequence
  Synthetic polypeptide representing artificial human antibody CDR-L3 region
MQATQFPYT

SEQ ID NO: 16344 - protein, 9 aa, Artificial Sequence
  Synthetic polypeptide representing artificial human antibody CDR-L3 region
QQSYSTPLT

SEQ ID NO: 16345 - protein, 8 aa, Artificial Sequence
  Synthetic polypeptide representing artificial human antibody CDR-L3 region
QQANSFPR

SEQ ID NO: 16346 - protein, 9 aa, Artificial Sequence
  Synthetic polypeptide representing artificial human antibody CDR-L3 region
QQYYGSPLA

SEQ ID NO: 16347 - protein, 9 aa, Artificial Sequence
  Synthetic polypeptide representing artificial human antibody CDR-L3 region
QQYDNLPYT

SEQ ID NO: 16348 - protein, 10 aa, Artificial Sequence
  Synthetic polypeptide representing artificial human antibody CDR-L3 region
QQYGSSPMYT

SEQ ID NO: 16349 - protein, 10 aa, Artificial Sequence
  Synthetic polypeptide representing artificial human antibody CDR-L3 region
QQYGSSPPFT

SEQ ID NO: 16350 - protein, 9 aa, Artificial Sequence
  Synthetic polypeptide representing artificial human antibody CDR-L3 region
MQAIQSPGT

SEQ ID NO: 16351 - protein, 11 aa, Artificial Sequence
  Synthetic polypeptide representing artificial human antibody CDR-L3 region
AAWDDSLSGHV

SEQ ID NO: 16352 - protein, 10 aa, Artificial Sequence
  Synthetic polypeptide representing artificial human antibody CDR-L3 region
CSYAGSYTYV

SEQ ID NO: 16353 - protein, 9 aa, Artificial Sequence
  Synthetic polypeptide representing artificial human antibody CDR-L3 region
LQDHNYLWT

SEQ ID NO: 16354 - protein, 9 aa, Artificial Sequence
  Synthetic polypeptide representing artificial human antibody CDR-L3 region
QQSYGNPYT

SEQ ID NO: 16355 - protein, 9 aa, Artificial Sequence
  Synthetic polypeptide representing artificial human antibody CDR-L3 region
QQSVRAPLS

SEQ ID NO: 16356 - protein, 10 aa, Artificial Sequence
  Synthetic polypeptide representing artificial human antibody CDR-L3 region
SSYTSSTTLV

SEQ ID NO: 16357 - protein, 9 aa, Artificial Sequence
  Synthetic polypeptide representing artificial human antibody CDR-L3 region
QQRSNWPLT

SEQ ID NO: 16358 - protein, 9 aa, Artificial Sequence
  Synthetic polypeptide representing artificial human antibody CDR-L3 region
LQDYNYPRT

SEQ ID NO: 16359 - protein, 9 aa, Artificial Sequence
  Synthetic polypeptide representing artificial human antibody CDR-L3 region
QQRSSWPLT

SEQ ID NO: 16360 - protein, 9 aa, Artificial Sequence
  Synthetic polypeptide representing artificial human antibody CDR-L3 region
MQGTHWPYT

SEQ ID NO: 16361 - protein, 12 aa, Artificial Sequence
  Synthetic polypeptide representing artificial human antibody CDR-L3 region
NSRDSSGNHNYV

SEQ ID NO: 16362 - protein, 10 aa, Artificial Sequence
  Synthetic polypeptide representing artificial human antibody CDR-L3 region
CSYAGSYTWV

SEQ ID NO: 16363 - protein, 9 aa, Artificial Sequence
  Synthetic polypeptide representing artificial human antibody CDR-L3 region
MQGTHWPLT

SEQ ID NO: 16364 - protein, 11 aa, Artificial Sequence
  Synthetic polypeptide representing artificial human antibody CDR-L3 region
CSYAGTYTSVL

SEQ ID NO: 16365 - protein, 11 aa, Artificial Sequence
  Synthetic polypeptide representing artificial human antibody CDR-L3 region
QSYDSRLSGWV

SEQ ID NO: 16366 - protein, 9 aa, Artificial Sequence
  Synthetic polypeptide representing artificial human antibody CDR-L3 region
QQGHSFPLT

SEQ ID NO: 16367 - protein, 11 aa, Artificial Sequence
  Synthetic polypeptide representing artificial human antibody CDR-L3 region
GTWDSSLNAVL

SEQ ID NO: 16368 - protein, 10 aa, Artificial Sequence
  Synthetic polypeptide representing artificial human antibody CDR-L3 region
SSYADTYTYV

SEQ ID NO: 16369 - protein, 8 aa, Artificial Sequence
  Synthetic polypeptide representing artificial human antibody CDR-L3 region
QQYSTSKT

SEQ ID NO: 16370 - protein, 9 aa, Artificial Sequence
  Synthetic polypeptide representing artificial human antibody CDR-L3 region
QQRSHWPPT

SEQ ID NO: 16371 - protein, 10 aa, Artificial Sequence
  Synthetic polypeptide representing artificial human antibody CDR-L3 region
SSYADTYNYV

SEQ ID NO: 16372 - protein, 9 aa, Artificial Sequence
  Synthetic polypeptide representing artificial human antibody CDR-L3 region
QQYNTYPWT

SEQ ID NO: 16373 - protein, 11 aa, Artificial Sequence
  Synthetic polypeptide representing artificial human antibody CDR-L3 region
SSYTSSSTPVV

SEQ ID NO: 16374 - protein, 11 aa, Artificial Sequence
  Synthetic polypeptide representing artificial human antibody CDR-L3 region
ASYDATLRGYV

SEQ ID NO: 16375 - protein, 10 aa, Artificial Sequence
  Synthetic polypeptide representing artificial human antibody CDR-L3 region
QSYDSSLSVV

SEQ ID NO: 16376 - protein, 9 aa, Artificial Sequence
  Synthetic polypeptide representing artificial human antibody CDR-L3 region
QQYYSTPYT

SEQ ID NO: 16377 - protein, 11 aa, Artificial Sequence
  Synthetic polypeptide representing artificial human antibody CDR-L3 region
AAWDDSLNGPV

SEQ ID NO: 16378 - protein, 10 aa, Artificial Sequence
  Synthetic polypeptide representing artificial human antibody CDR-L3 region
QQYNNWPPLT

SEQ ID NO: 16379 - protein, 11 aa, Artificial Sequence
  Synthetic polypeptide representing artificial human antibody CDR-L3 region
NSRDSSGNHRV

SEQ ID NO: 16380 - protein, 9 aa, Artificial Sequence
  Synthetic polypeptide representing artificial human antibody CDR-L3 region
QQLNTYPLT

SEQ ID NO: 16381 - protein, 11 aa, Artificial Sequence
  Synthetic polypeptide representing artificial human antibody CDR-L3 region
QSADSSGTYVV

SEQ ID NO: 16382 - protein, 9 aa, Artificial Sequence
  Synthetic polypeptide representing artificial human antibody CDR-L3 region
QAWDSSGVV

SEQ ID NO: 16383 - protein, 11 aa, Artificial Sequence
  Synthetic polypeptide representing artificial human antibody CDR-L3 region
GTWDSSLSVWV

SEQ ID NO: 16384 - protein, 11 aa, Artificial Sequence
  Synthetic polypeptide representing artificial human antibody CDR-L3 region
SSRDRSGDRVI

SEQ ID NO: 16385 - protein, 10 aa, Artificial Sequence
  Synthetic polypeptide representing artificial human antibody CDR-L3 region
QQSFSTPRVT

SEQ ID NO: 16386 - protein, 11 aa, Artificial Sequence
  Synthetic polypeptide representing artificial human antibody CDR-L3 region
AAWDDSLSGVV

SEQ ID NO: 16387 - protein, 10 aa, Artificial Sequence
  Synthetic polypeptide representing artificial human antibody CDR-L3 region
NSYTITGAYV

SEQ ID NO: 16388 - protein, 11 aa, Artificial Sequence
  Synthetic polypeptide representing artificial human antibody CDR-L3 region
QSADSSGTYVV

SEQ ID NO: 16389 - protein, 11 aa, Artificial Sequence
  Synthetic polypeptide representing artificial human antibody CDR-L3 region
SSRDSSDHLLV

SEQ ID NO: 16390 - protein, 9 aa, Artificial Sequence
  Synthetic polypeptide representing artificial human antibody CDR-L3 region
QQRSNWPFT

SEQ ID NO: 16391 - protein, 11 aa, Artificial Sequence
  Synthetic polypeptide representing artificial human antibody CDR-L3 region
SSRDRSGDHVI

SEQ ID NO: 16392 - protein, 11 aa, Artificial Sequence
  Synthetic polypeptide representing artificial human antibody CDR-L3 region
QSADNSDTYQV

SEQ ID NO: 16393 - protein, 9 aa, Artificial Sequence
  Synthetic polypeptide representing artificial human antibody CDR-L3 region
QQYYSTPLT

SEQ ID NO: 16394 - protein, 9 aa, Artificial Sequence
  Synthetic polypeptide representing artificial human antibody CDR-L3 region
QSADISGRV

SEQ ID NO: 16395 - protein, 9 aa, Artificial Sequence
  Synthetic polypeptide representing artificial human antibody CDR-L3 region
QQSYSTPLT

SEQ ID NO: 16396 - protein, 10 aa, Artificial Sequence
  Synthetic polypeptide representing artificial human antibody CDR-L3 region
QAWDTISHVV

SEQ ID NO: 16397 - protein, 9 aa, Artificial Sequence
  Synthetic polypeptide representing artificial human antibody CDR-L3 region
QQRSNWPPT

SEQ ID NO: 16398 - protein, 9 aa, Artificial Sequence
  Synthetic polypeptide representing artificial human antibody CDR-L3 region
QQSYRTPIT

SEQ ID NO: 16399 - protein, 6 aa, Artificial Sequence
  Synthetic polypeptide representing artificial human antibody CDR-L3 region
QLYGNT

SEQ ID NO: 16400 - protein, 11 aa, Artificial Sequence
  Synthetic polypeptide representing artificial human antibody CDR-L3 region
SSRDSSDNLLM

SEQ ID NO: 16401 - protein, 12 aa, Artificial Sequence
  Synthetic polypeptide representing artificial human antibody CDR-L3 region
NSRDSSGNLNVV

SEQ ID NO: 16402 - protein, 11 aa, Artificial Sequence
  Synthetic polypeptide representing artificial human antibody CDR-L3 region
SSRDRSGDRVI

SEQ ID NO: 16403 - protein, 10 aa, Artificial Sequence
  Synthetic polypeptide representing artificial human antibody CDR-L3 region
VLYMGSGIWV

SEQ ID NO: 16404 - protein, 11 aa, Artificial Sequence
  Synthetic polypeptide representing artificial human antibody CDR-L3 region
NSRDRSGDRVI

SEQ ID NO: 16405 - protein, 9 aa, Artificial Sequence
  Synthetic polypeptide representing artificial human antibody CDR-L3 region
QQYYTIPYT

SEQ ID NO: 16406 - protein, 10 aa, Artificial Sequence
  Synthetic polypeptide representing artificial human antibody CDR-L3 region
SSYTSSSTLI

SEQ ID NO: 16407 - protein, 10 aa, Artificial Sequence
  Synthetic polypeptide representing artificial human antibody CDR-L3 region
QSYDSSLSVV

SEQ ID NO: 16408 - protein, 11 aa, Artificial Sequence
  Synthetic polypeptide representing artificial human antibody CDR-L3 region
QSADSSGTYWV

SEQ ID NO: 16409 - protein, 10 aa, Artificial Sequence
  Synthetic polypeptide representing artificial human antibody CDR-L3 region
QSYDSTLSAV

SEQ ID NO: 16410 - protein, 10 aa, Artificial Sequence
  Synthetic polypeptide representing artificial human antibody CDR-L3 region
SSYTSRSTLV

SEQ ID NO: 16411 - protein, 10 aa, Artificial Sequence
  Synthetic polypeptide representing artificial human antibody CDR-L3 region
SSYTSSSTYV

SEQ ID NO: 16412 - protein, 9 aa, Artificial Sequence
  Synthetic polypeptide representing artificial human antibody CDR-L3 region
QQSYSTPIT

SEQ ID NO: 16413 - protein, 11 aa, Artificial Sequence
  Synthetic polypeptide representing artificial human antibody CDR-L3 region
QQRSSWPPRIT

SEQ ID NO: 16414 - protein, 9 aa, Artificial Sequence
  Synthetic polypeptide representing artificial human antibody CDR-L3 region
MQALQTPYT

SEQ ID NO: 16415 - protein, 11 aa, Artificial Sequence
  Synthetic polypeptide representing artificial human antibody CDR-L3 region
SSRDRSGDHVI

SEQ ID NO: 16416 - protein, 9 aa, Artificial Sequence
  Synthetic polypeptide representing artificial human antibody CDR-L3 region
QSWDSITGV

SEQ ID NO: 16417 - protein, 11 aa, Artificial Sequence
  Synthetic polypeptide representing artificial human antibody CDR-L3 region
SSRDRSGDRVL

SEQ ID NO: 16418 - protein, 11 aa, Artificial Sequence
  Synthetic polypeptide representing artificial human antibody CDR-L3 region
NSRDRSGDHVV

SEQ ID NO: 16419 - protein, 10 aa, Artificial Sequence
  Synthetic polypeptide representing artificial human antibody CDR-L3 region
QQYGSSPLFT

SEQ ID NO: 16420 - protein, 11 aa, Artificial Sequence
  Synthetic polypeptide representing artificial human antibody CDR-L3 region
SSRDRSGDLVL

SEQ ID NO: 16421 - protein, 10 aa, Artificial Sequence
  Synthetic polypeptide representing artificial human antibody CDR-L3 region
GSYTGSNKNV

SEQ ID NO: 16422 - protein, 9 aa, Artificial Sequence
  Synthetic polypeptide representing artificial human antibody CDR-L3 region
QSYDRTNVI

SEQ ID NO: 16423 - protein, 10 aa, Artificial Sequence
  Synthetic polypeptide representing artificial human antibody CDR-L3 region
QAWESSTVVV

SEQ ID NO: 16424 - protein, 10 aa, Artificial Sequence
  Synthetic polypeptide representing artificial human antibody CDR-L3 region
GTWDSSLSAL

SEQ ID NO: 16425 - protein, 10 aa, Artificial Sequence
  Synthetic polypeptide representing artificial human antibody CDR-L3 region
CSYAGSSTLV

SEQ ID NO: 16426 - protein, 10 aa, Artificial Sequence
  Synthetic polypeptide representing artificial human antibody CDR-L3 region
QQYGSSLPIT

SEQ ID NO: 16427 - protein, 11 aa, Artificial Sequence
  Synthetic polypeptide representing artificial human antibody CDR-L3 region
NSRDRSGDHVI

SEQ ID NO: 16428 - protein, 9 aa, Artificial Sequence
  Synthetic polypeptide representing artificial human antibody CDR-L3 region
QQFDSYPLT

SEQ ID NO: 16429 - protein, 10 aa, Artificial Sequence
  Synthetic polypeptide representing artificial human antibody CDR-L3 region
QQYYTTPGIT

SEQ ID NO: 16430 - protein, 12 aa, Artificial Sequence
  Synthetic polypeptide representing artificial human antibody CDR-L3 region
QQYDNLPPNFFT

SEQ ID NO: 16431 - protein, 9 aa, Artificial Sequence
  Synthetic polypeptide representing artificial human antibody CDR-L3 region
QQSYSTPIT

SEQ ID NO: 16432 - protein, 10 aa, Artificial Sequence
  Synthetic polypeptide representing artificial human antibody CDR-L3 region
QAWDSSTDVV

SEQ ID NO: 16433 - protein, 5 aa, Artificial Sequence
  Synthetic polypeptide representing artificial human antibody CDR-L3 region
QSYEV

SEQ ID NO: 16434 - protein, 11 aa, Artificial Sequence
  Synthetic polypeptide representing artificial human antibody CDR-L3 region
GTWDSSLSAGV

SEQ ID NO: 16435 - protein, 10 aa, Artificial Sequence
  Synthetic polypeptide representing artificial human antibody CDR-L3 region
SSYTSSSTLV

SEQ ID NO: 16436 - protein, 11 aa, Artificial Sequence
  Synthetic polypeptide representing artificial human antibody CDR-L3 region
QSYDNSLSGWV

SEQ ID NO: 16437 - protein, 11 aa, Artificial Sequence
  Synthetic polypeptide representing artificial human antibody CDR-L3 region
SSYTSSSTLEV

SEQ ID NO: 16438 - protein, 9 aa, Artificial Sequence
  Synthetic polypeptide representing artificial human antibody CDR-L3 region
QQYGRSPRT

SEQ ID NO: 16439 - protein, 11 aa, Artificial Sequence
  Synthetic polypeptide representing artificial human antibody CDR-L3 region
AAWDDSLRGLV

SEQ ID NO: 16440 - protein, 8 aa, Artificial Sequence
  Synthetic polypeptide representing artificial human antibody CDR-L3 region
QQYGSSYT

SEQ ID NO: 16441 - protein, 10 aa, Artificial Sequence
  Synthetic polypeptide representing artificial human antibody CDR-L3 region
QQYYSIPGIT

SEQ ID NO: 16442 - protein, 9 aa, Artificial Sequence
  Synthetic polypeptide representing artificial human antibody CDR-L3 region
QQANSFPWT

SEQ ID NO: 16443 - protein, 11 aa, Artificial Sequence
  Synthetic polypeptide representing artificial human antibody CDR-L3 region
GTWDSSLSAEV

SEQ ID NO: 16444 - protein, 8 aa, Artificial Sequence
  Synthetic polypeptide representing artificial human antibody CDR-L3 region
QQRSNWPT

SEQ ID NO: 16445 - protein, 9 aa, Artificial Sequence
  Synthetic polypeptide representing artificial human antibody CDR-L3 region
QKYNSVPWT

SEQ ID NO: 16446 - protein, 11 aa, Artificial Sequence
  Synthetic polypeptide representing artificial human antibody CDR-L3 region
GTWDSSLSVVV

SEQ ID NO: 16447 - protein, 9 aa, Artificial Sequence
  Synthetic polypeptide representing artificial human antibody CDR-L3 region
QQYYSTPLT

SEQ ID NO: 16448 - protein, 10 aa, Artificial Sequence
  Synthetic polypeptide representing artificial human antibody CDR-L3 region
AAWDDSLTYV

SEQ ID NO: 16449 - protein, 10 aa, Artificial Sequence
  Synthetic polypeptide representing artificial human antibody CDR-L3 region
CSQSGSDAVL

SEQ ID NO: 16450 - protein, 9 aa, Artificial Sequence
  Synthetic polypeptide representing artificial human antibody CDR-L3 region
QVWDYDGVT

SEQ ID NO: 16451 - protein, 10 aa, Artificial Sequence
  Synthetic polypeptide representing artificial human antibody CDR-L3 region
QSADSSGTWV

SEQ ID NO: 16452 - protein, 10 aa, Artificial Sequence
  Synthetic polypeptide representing artificial human antibody CDR-L3 region
QQYYSAPGFT

SEQ ID NO: 16453 - protein, 9 aa, Artificial Sequence
  Synthetic polypeptide representing artificial human antibody CDR-L3 region
MQARQIPQT

SEQ ID NO: 16454 - protein, 11 aa, Artificial Sequence
  Synthetic polypeptide representing artificial human antibody CDR-L3 region
SSRDSSDSLLV

SEQ ID NO: 16455 - protein, 11 aa, Artificial Sequence
  Synthetic polypeptide representing artificial human antibody CDR-L3 region
SSYTSSSTFRV

SEQ ID NO: 16456 - protein, 9 aa, Artificial Sequence
  Synthetic polypeptide representing artificial human antibody CDR-L3 region
MQGIYWPFT

SEQ ID NO: 16457 - protein, 10 aa, Artificial Sequence
  Synthetic polypeptide representing artificial human antibody CDR-L3 region
QVWDSSSDSV

SEQ ID NO: 16458 - protein, 8 aa, Artificial Sequence
  Synthetic polypeptide representing artificial human antibody CDR-L3 region
QQYNDWWT

SEQ ID NO: 16459 - protein, 13 aa, Artificial Sequence
  Synthetic polypeptide representing artificial human antibody CDR-L3 region
NSRDSSGNHLRGV

SEQ ID NO: 16460 - protein, 9 aa, Artificial Sequence
  Synthetic polypeptide representing artificial human antibody CDR-L3 region
MQALQTPPA

SEQ ID NO: 16461 - protein, 9 aa, Artificial Sequence
  Synthetic polypeptide representing artificial human antibody CDR-L3 region
MQALQTPLT

SEQ ID NO: 16462 - protein, 6 aa, Artificial Sequence
  Synthetic polypeptide representing artificial human antibody CDR-L3 region
HHSRGP

SEQ ID NO: 16463 - protein, 11 aa, Artificial Sequence
  Synthetic polypeptide representing artificial human antibody CDR-L3 region
AAWDDSLNGWV

SEQ ID NO: 16464 - protein, 9 aa, Artificial Sequence
  Synthetic polypeptide representing artificial human antibody CDR-L3 region
QQYGSSPLT

SEQ ID NO: 16465 - protein, 10 aa, Artificial Sequence
  Synthetic polypeptide representing artificial human antibody CDR-L3 region
VLYMGSGIWV

SEQ ID NO: 16466 - protein, 11 aa, Artificial Sequence
  Synthetic polypeptide representing artificial human antibody CDR-L3 region
AAWDDSLSGGV

SEQ ID NO: 16467 - protein, 10 aa, Artificial Sequence
  Synthetic polypeptide representing artificial human antibody CDR-L3 region
QAWDSRRTVV

SEQ ID NO: 16468 - protein, 10 aa, Artificial Sequence
  Synthetic polypeptide representing artificial human antibody CDR-L3 region
TSYTTSGTLV

SEQ ID NO: 16469 - protein, 11 aa, Artificial Sequence
  Synthetic polypeptide representing artificial human antibody CDR-L3 region
AAWDDSLSGPV

SEQ ID NO: 16470 - protein, 9 aa, Artificial Sequence
  Synthetic polypeptide representing artificial human antibody CDR-L3 region
QQTYNIPWT

SEQ ID NO: 16471 - protein, 11 aa, Artificial Sequence
  Synthetic polypeptide representing artificial human antibody CDR-L3 region
YSRDSSGNHGV

SEQ ID NO: 16472 - protein, 10 aa, Artificial Sequence
  Synthetic polypeptide representing artificial human antibody CDR-L3 region
SSYTIRNTLV

SEQ ID NO: 16473 - protein, 7 aa, Artificial Sequence
  Synthetic polypeptide representing artificial human antibody CDR-L3 region
QSTYSSA

SEQ ID NO: 16474 - protein, 11 aa, Artificial Sequence
  Synthetic polypeptide representing artificial human antibody CDR-L3 region
AAWDDSLNGPV

SEQ ID NO: 16475 - protein, 11 aa, Artificial Sequence
  Synthetic polypeptide representing artificial human antibody CDR-L3 region
NSRDSSGTQVV

SEQ ID NO: 16476 - protein, 9 aa, Artificial Sequence
  Synthetic polypeptide representing artificial human antibody CDR-L3 region
QQYNDWPLT

SEQ ID NO: 16477 - protein, 10 aa, Artificial Sequence
  Synthetic polypeptide representing artificial human antibody CDR-L3 region
QQYDNLLPIT

SEQ ID NO: 16478 - protein, 9 aa, Artificial Sequence
  Synthetic polypeptide representing artificial human antibody CDR-L3 region
QQLNSYPLT

SEQ ID NO: 16479 - protein, 12 aa, Artificial Sequence
  Synthetic polypeptide representing artificial human antibody CDR-L3 region
ASWDDSLNGHVV

SEQ ID NO: 16480 - protein, 9 aa, Artificial Sequence
  Synthetic polypeptide representing artificial human antibody CDR-L3 region
MQATQIPWT

SEQ ID NO: 16481 - protein, 8 aa, Artificial Sequence
  Synthetic polypeptide representing artificial human antibody CDR-L3 region
QAWDSSVV

SEQ ID NO: 16482 - protein, 11 aa, Artificial Sequence
  Synthetic polypeptide representing artificial human antibody CDR-L3 region
NSRDSSGNHLV

SEQ ID NO: 16483 - protein, 8 aa, Artificial Sequence
  Synthetic polypeptide representing artificial human antibody CDR-L3 region
LQAVHPWT

SEQ ID NO: 16484 - protein, 9 aa, Artificial Sequence
  Synthetic polypeptide representing artificial human antibody CDR-L3 region
QKYNGAPFS

SEQ ID NO: 16485 - protein, 9 aa, Artificial Sequence
  Synthetic polypeptide representing artificial human antibody CDR-L3 region
TQATQFPHT

SEQ ID NO: 16486 - protein, 9 aa, Artificial Sequence
  Synthetic polypeptide representing artificial human antibody CDR-L3 region
QAWDSTTVV

SEQ ID NO: 16487 - protein, 9 aa, Artificial Sequence
  Synthetic polypeptide representing artificial human antibody CDR-L3 region
QQYNEWPLT

SEQ ID NO: 16488 - protein, 9 aa, Artificial Sequence
  Synthetic polypeptide representing artificial human antibody CDR-L3 region
MQGTHWPWT

SEQ ID NO: 16489 - protein, 11 aa, Artificial Sequence
  Synthetic polypeptide representing artificial human antibody CDR-L3 region
ETWDSSLNSVL

SEQ ID NO: 16490 - protein, 9 aa, Artificial Sequence
  Synthetic polypeptide representing artificial human antibody CDR-L3 region
QQSYSTLPT

SEQ ID NO: 16491 - protein, 9 aa, Artificial Sequence
  Synthetic polypeptide representing artificial human antibody CDR-L3 region
MQALQTPYT

SEQ ID NO: 16492 - protein, 12 aa, Artificial Sequence
  Synthetic polypeptide representing artificial human antibody CDR-L3 region
AAWDDSLSGSVV

SEQ ID NO: 16493 - protein, 13 aa, Artificial Sequence
  Synthetic polypeptide representing artificial human antibody CDR-L3 region
ATWDGSVDLGSYV

SEQ ID NO: 16494 - protein, 11 aa, Artificial Sequence
  Synthetic polypeptide representing artificial human antibody CDR-L3 region
QSYDSSLGGPV

SEQ ID NO: 16495 - protein, 9 aa, Artificial Sequence
  Synthetic polypeptide representing artificial human antibody CDR-L3 region
MQGSHWPLT

SEQ ID NO: 16496 - protein, 11 aa, Artificial Sequence
  Synthetic polypeptide representing artificial human antibody CDR-L3 region
QSADSSGTYLV

SEQ ID NO: 16497 - protein, 12 aa, Artificial Sequence
  Synthetic polypeptide representing artificial human antibody CDR-L3 region
AAWDDSLNGSNV

SEQ ID NO: 16498 - protein, 10 aa, Artificial Sequence
  Synthetic polypeptide representing artificial human antibody CDR-L3 region
QTWDSRNGGV

SEQ ID NO: 16499 - protein, 10 aa, Artificial Sequence
  Synthetic polypeptide representing artificial human antibody CDR-L3 region
QQYYITLALT

SEQ ID NO: 16500 - protein, 9 aa, Artificial Sequence
  Synthetic polypeptide representing artificial human antibody CDR-L3 region
QQSHSTPMT

SEQ ID NO: 16501 - protein, 9 aa, Artificial Sequence
  Synthetic polypeptide representing artificial human antibody CDR-L3 region
QQYGTSPYT

SEQ ID NO: 16502 - protein, 9 aa, Artificial Sequence
  Synthetic polypeptide representing artificial human antibody CDR-L3 region
QQYNSYPRT

SEQ ID NO: 16503 - protein, 8 aa, Artificial Sequence
  Synthetic polypeptide representing artificial human antibody CDR-L3 region
MQGTYLRT

SEQ ID NO: 16504 - protein, 9 aa, Artificial Sequence
  Synthetic polypeptide representing artificial human antibody CDR-L3 region
QHYHGWPLT

SEQ ID NO: 16505 - protein, 9 aa, Artificial Sequence
  Synthetic polypeptide representing artificial human antibody CDR-L3 region
QQSLTIPLT

SEQ ID NO: 16506 - protein, 11 aa, Artificial Sequence
  Synthetic polypeptide representing artificial human antibody CDR-L3 region
AAWDDSLNGVV

SEQ ID NO: 16507 - protein, 11 aa, Artificial Sequence
  Synthetic polypeptide representing artificial human antibody CDR-L3 region
QSADTSGSPVV

SEQ ID NO: 16508 - protein, 9 aa, Artificial Sequence
  Synthetic polypeptide representing artificial human antibody CDR-L3 region
LQHYNYPYT

SEQ ID NO: 16509 - protein, 9 aa, Artificial Sequence
  Synthetic polypeptide representing artificial human antibody CDR-L3 region
QSADSSGTV

SEQ ID NO: 16510 - protein, 10 aa, Artificial Sequence
  Synthetic polypeptide representing artificial human antibody CDR-L3 region
QSYDITLSFV

SEQ ID NO: 16511 - protein, 9 aa, Artificial Sequence
  Synthetic polypeptide representing artificial human antibody CDR-L3 region
QQYGSSPLT

SEQ ID NO: 16512 - protein, 12 aa, Artificial Sequence
  Synthetic polypeptide representing artificial human antibody CDR-L3 region
QMWDPFGDHPVV

SEQ ID NO: 16513 - protein, 9 aa, Artificial Sequence
  Synthetic polypeptide representing artificial human antibody CDR-L3 region
QQLNSYPIT

SEQ ID NO: 16514 - protein, 9 aa, Artificial Sequence
  Synthetic polypeptide representing artificial human antibody CDR-L3 region
QQSDDWPLT

SEQ ID NO: 16515 - protein, 8 aa, Artificial Sequence
  Synthetic polypeptide representing artificial human antibody CDR-L3 region
QQYSTSPL

SEQ ID NO: 16516 - protein, 9 aa, Artificial Sequence
  Synthetic polypeptide representing artificial human antibody CDR-L3 region
MQATQFPQT

SEQ ID NO: 16517 - protein, 10 aa, Artificial Sequence
  Synthetic polypeptide representing artificial human antibody CDR-L3 region
VLYMGGGIWV

SEQ ID NO: 16518 - protein, 11 aa, Artificial Sequence
  Synthetic polypeptide representing artificial human antibody CDR-L3 region
YSTDSSGNRWV

SEQ ID NO: 16519 - protein, 9 aa, Artificial Sequence
  Synthetic polypeptide representing artificial human antibody CDR-L3 region
QQTYSAPRT

SEQ ID NO: 16520 - protein, 10 aa, Artificial Sequence
  Synthetic polypeptide representing artificial human antibody CDR-L3 region
YSWTDNNLGL

SEQ ID NO: 16521 - protein, 9 aa, Artificial Sequence
  Synthetic polypeptide representing artificial human antibody CDR-L3 region
QKYNGAPFS

SEQ ID NO: 16522 - protein, 11 aa, Artificial Sequence
  Synthetic polypeptide representing artificial human antibody CDR-L3 region
SSYTNSSTLRV

SEQ ID NO: 16523 - protein, 10 aa, Artificial Sequence
  Synthetic polypeptide representing artificial human antibody CDR-L3 region
QSFDSSPQVV

SEQ ID NO: 16524 - protein, 9 aa, Artificial Sequence
  Synthetic polypeptide representing artificial human antibody CDR-L3 region
LLFYGGIWM

SEQ ID NO: 16525 - protein, 9 aa, Artificial Sequence
  Synthetic polypeptide representing artificial human antibody CDR-L3 region
MQALQTGYT

SEQ ID NO: 16526 - protein, 11 aa, Artificial Sequence
  Synthetic polypeptide representing artificial human antibody CDR-L3 region
NSRDSSGNHQV

SEQ ID NO: 16527 - protein, 10 aa, Artificial Sequence
  Synthetic polypeptide representing artificial human antibody CDR-L3 region
CSYAGSSTLV

SEQ ID NO: 16528 - protein, 9 aa, Artificial Sequence
  Synthetic polypeptide representing artificial human antibody CDR-L3 region
QQRSNWPFT

SEQ ID NO: 16529 - protein, 9 aa, Artificial Sequence
  Synthetic polypeptide representing artificial human antibody CDR-L3 region
QQANSFPYT

SEQ ID NO: 16530 - protein, 9 aa, Artificial Sequence
  Synthetic polypeptide representing artificial human antibody CDR-L3 region
SSYEIDSWL

SEQ ID NO: 16531 - protein, 8 aa, Artificial Sequence
  Synthetic polypeptide representing artificial human antibody CDR-L3 region
QAWGSRVV

SEQ ID NO: 16532 - protein, 9 aa, Artificial Sequence
  Synthetic polypeptide representing artificial human antibody CDR-L3 region
LQHDSFPRT

SEQ ID NO: 16533 - protein, 7 aa, Artificial Sequence
  Synthetic polypeptide representing artificial human antibody CDR-L3 region
QQYKTHT

SEQ ID NO: 16534 - protein, 9 aa, Artificial Sequence
  Synthetic polypeptide representing artificial human antibody CDR-L3 region
QQSGSSPKT

SEQ ID NO: 16535 - protein, 10 aa, Artificial Sequence
  Synthetic polypeptide representing artificial human antibody CDR-L3 region
ASYTTSGTVV

SEQ ID NO: 16536 - protein, 11 aa, Artificial Sequence
  Synthetic polypeptide representing artificial human antibody CDR-L3 region
AAWDDSLSGPV

SEQ ID NO: 16537 - protein, 9 aa, Artificial Sequence
  Synthetic polypeptide representing artificial human antibody CDR-L3 region
QQYGSSSLT

SEQ ID NO: 16538 - protein, 13 aa, Artificial Sequence
  Synthetic polypeptide representing artificial human antibody CDR-L3 region
QSYDSSLSGWHVV

SEQ ID NO: 16539 - protein, 10 aa, Artificial Sequence
  Synthetic polypeptide representing artificial human antibody CDR-L3 region
CSYAGSSTLV

SEQ ID NO: 16540 - protein, 9 aa, Artificial Sequence
  Synthetic polypeptide representing artificial human antibody CDR-L3 region
LFYYRASYV

SEQ ID NO: 16541 - protein, 9 aa, Artificial Sequence
  Synthetic polypeptide representing artificial human antibody CDR-L3 region
QQRSDWPIT

SEQ ID NO: 16542 - protein, 11 aa, Artificial Sequence
  Synthetic polypeptide representing artificial human antibody CDR-L3 region
GTWDSSLSAGV

SEQ ID NO: 16543 - protein, 8 aa, Artificial Sequence
  Synthetic polypeptide representing artificial human antibody CDR-L3 region
VQSLQSWT

SEQ ID NO: 16544 - protein, 10 aa, Artificial Sequence
  Synthetic polypeptide representing artificial human antibody CDR-L3 region
CSYAGSSTYV

SEQ ID NO: 16545 - protein, 9 aa, Artificial Sequence
  Synthetic polypeptide representing artificial human antibody CDR-L3 region
QQYNSYSRT

SEQ ID NO: 16546 - protein, 11 aa, Artificial Sequence
  Synthetic polypeptide representing artificial human antibody CDR-L3 region
QVWDSSSDQVV

SEQ ID NO: 16547 - protein, 9 aa, Artificial Sequence
  Synthetic polypeptide representing artificial human antibody CDR-L3 region
QQYNSYSRT

SEQ ID NO: 16548 - protein, 10 aa, Artificial Sequence
  Synthetic polypeptide representing artificial human antibody CDR-L3 region
QQRSNWPSIT

SEQ ID NO: 16549 - protein, 9 aa, Artificial Sequence
  Synthetic polypeptide representing artificial human antibody CDR-L3 region
QQSYSTPYT

SEQ ID NO: 16550 - protein, 9 aa, Artificial Sequence
  Synthetic polypeptide representing artificial human antibody CDR-L3 region
LLSFGTARV

SEQ ID NO: 16551 - protein, 9 aa, Artificial Sequence
  Synthetic polypeptide representing artificial human antibody CDR-L3 region
MQATQFPLT

SEQ ID NO: 16552 - protein, 9 aa, Artificial Sequence
  Synthetic polypeptide representing artificial human antibody CDR-L3 region
QHYDSLPPT

SEQ ID NO: 16553 - protein, 11 aa, Artificial Sequence
  Synthetic polypeptide representing artificial human antibody CDR-L3 region
SSYAGSNNPVV

SEQ ID NO: 16554 - protein, 10 aa, Artificial Sequence
  Synthetic polypeptide representing artificial human antibody CDR-L3 region
CSYAGSYTYV

SEQ ID NO: 16555 - protein, 9 aa, Artificial Sequence
  Synthetic polypeptide representing artificial human antibody CDR-L3 region
QAWDSSTVV

SEQ ID NO: 16556 - protein, 10 aa, Artificial Sequence
  Synthetic polypeptide representing artificial human antibody CDR-L3 region
CSYAGSSTLV

SEQ ID NO: 16557 - protein, 8 aa, Artificial Sequence
  Synthetic polypeptide representing artificial human antibody CDR-L3 region
QQYGSSRT

SEQ ID NO: 16558 - protein, 10 aa, Artificial Sequence
  Synthetic polypeptide representing artificial human antibody CDR-L3 region
CSYTSSSTWV

SEQ ID NO: 16559 - protein, 9 aa, Artificial Sequence
  Synthetic polypeptide representing artificial human antibody CDR-L3 region
QQYYSTPQT

SEQ ID NO: 16560 - protein, 11 aa, Artificial Sequence
  Synthetic polypeptide representing artificial human antibody CDR-L3 region
GTWDSSLSAVV

SEQ ID NO: 16561 - protein, 10 aa, Artificial Sequence
  Synthetic polypeptide representing artificial human antibody CDR-L3 region
CSYAGSYTFV

SEQ ID NO: 16562 - protein, 9 aa, Artificial Sequence
  Synthetic polypeptide representing artificial human antibody CDR-L3 region
QQYSSTPFT

SEQ ID NO: 16563 - protein, 10 aa, Artificial Sequence
  Synthetic polypeptide representing artificial human antibody CDR-L3 region
CSYAGSSTVV

SEQ ID NO: 16564 - protein, 10 aa, Artificial Sequence
  Synthetic polypeptide representing artificial human antibody CDR-L3 region
GSYTSSSTLL

SEQ ID NO: 16565 - protein, 9 aa, Artificial Sequence
  Synthetic polypeptide representing artificial human antibody CDR-L3 region
QQYNSYEGT

SEQ ID NO: 16566 - protein, 9 aa, Artificial Sequence
  Synthetic polypeptide representing artificial human antibody CDR-L3 region
QQSYSTPFT

SEQ ID NO: 16567 - protein, 9 aa, Artificial Sequence
  Synthetic polypeptide representing artificial human antibody CDR-L3 region
LQHNTYPRT

SEQ ID NO: 16568 - protein, 9 aa, Artificial Sequence
  Synthetic polypeptide representing artificial human antibody CDR-L3 region
QQYNSYSYT

SEQ ID NO: 16569 - protein, 9 aa, Artificial Sequence
  Synthetic polypeptide representing artificial human antibody CDR-L3 region
QQYYSRPWT

SEQ ID NO: 16570 - protein, 9 aa, Artificial Sequence
  Synthetic polypeptide representing artificial human antibody CDR-L3 region
QQYGSSLWT

SEQ ID NO: 16571 - protein, 9 aa, Artificial Sequence
  Synthetic polypeptide representing artificial human antibody CDR-L3 region
QQRSNWPLT

SEQ ID NO: 16572 - protein, 10 aa, Artificial Sequence
  Synthetic polypeptide representing artificial human antibody CDR-L3 region
QQYGTSPPWT

SEQ ID NO: 16573 - protein, 9 aa, Artificial Sequence
  Synthetic polypeptide representing artificial human antibody CDR-L3 region
QQYFSTPLT

SEQ ID NO: 16574 - protein, 10 aa, Artificial Sequence
  Synthetic polypeptide representing artificial human antibody CDR-L3 region
SSCTSSSTLV

SEQ ID NO: 16575 - protein, 11 aa, Artificial Sequence
  Synthetic polypeptide representing artificial human antibody CDR-L3 region
GTWDSSLSAYV

SEQ ID NO: 16576 - protein, 11 aa, Artificial Sequence
  Synthetic polypeptide representing artificial human antibody CDR-L3 region
YSTDSSGNHRV

SEQ ID NO: 16577 - protein, 10 aa, Artificial Sequence
  Synthetic polypeptide representing artificial human antibody CDR-L3 region
QQRSNWPPLT

SEQ ID NO: 16578 - protein, 9 aa, Artificial Sequence
  Synthetic polypeptide representing artificial human antibody CDR-L3 region
QQYGSSPWT

SEQ ID NO: 16579 - protein, 9 aa, Artificial Sequence
  Synthetic polypeptide representing artificial human antibody CDR-L3 region
QQYYSRPLT

SEQ ID NO: 16580 - protein, 9 aa, Artificial Sequence
  Synthetic polypeptide representing artificial human antibody CDR-L3 region
MQTKQLPLT

SEQ ID NO: 16581 - protein, 9 aa, Artificial Sequence
  Synthetic polypeptide representing artificial human antibody CDR-L3 region
MQATQFPLT

SEQ ID NO: 16582 - protein, 11 aa, Artificial Sequence
  Synthetic polypeptide representing artificial human antibody CDR-L3 region
NSRDSSGNHWV

SEQ ID NO: 16583 - protein, 9 aa, Artificial Sequence
  Synthetic polypeptide representing artificial human antibody CDR-L3 region
LQYNTYPRT

SEQ ID NO: 16584 - protein, 9 aa, Artificial Sequence
  Synthetic polypeptide representing artificial human antibody CDR-L3 region
QAWDSSTVV

SEQ ID NO: 16585 - protein, 8 aa, Artificial Sequence
  Synthetic polypeptide representing artificial human antibody CDR-L3 region
QQRSNWLT

SEQ ID NO: 16586 - protein, 10 aa, Artificial Sequence
  Synthetic polypeptide representing artificial human antibody CDR-L3 region
CSYTTSGPFV

SEQ ID NO: 16587 - protein, 9 aa, Artificial Sequence
  Synthetic polypeptide representing artificial human antibody CDR-L3 region
QQYNSYSWT

SEQ ID NO: 16588 - protein, 9 aa, Artificial Sequence
  Synthetic polypeptide representing artificial human antibody CDR-L3 region
QQYDNLPFT

SEQ ID NO: 16589 - protein, 10 aa, Artificial Sequence
  Synthetic polypeptide representing artificial human antibody CDR-L3 region
QSYDRSLSQV

SEQ ID NO: 16590 - protein, 8 aa, Artificial Sequence
  Synthetic polypeptide representing artificial human antibody CDR-L3 region
HQYHSIPT

SEQ ID NO: 16591 - protein, 10 aa, Artificial Sequence
  Synthetic polypeptide representing artificial human antibody CDR-L3 region
SSYTSSTTVV

SEQ ID NO: 16592 - protein, 9 aa, Artificial Sequence
  Synthetic polypeptide representing artificial human antibody CDR-L3 region
MQATQFPFT

SEQ ID NO: 16593 - protein, 11 aa, Artificial Sequence
  Synthetic polypeptide representing artificial human antibody CDR-L3 region
QVWDSSSDHPV

SEQ ID NO: 16594 - protein, 9 aa, Artificial Sequence
  Synthetic polypeptide representing artificial human antibody CDR-L3 region
QQYGSSPYT

SEQ ID NO: 16595 - protein, 9 aa, Artificial Sequence
  Synthetic polypeptide representing artificial human antibody CDR-L3 region
LQHNSYPFT

SEQ ID NO: 16596 - protein, 9 aa, Artificial Sequence
  Synthetic polypeptide representing artificial human antibody CDR-L3 region
QQYNSYSYT

SEQ ID NO: 16597 - protein, 11 aa, Artificial Sequence
  Synthetic polypeptide representing artificial human antibody CDR-L3 region
NSRDSSGNHLV

SEQ ID NO: 16598 - protein, 9 aa, Artificial Sequence
  Synthetic polypeptide representing artificial human antibody CDR-L3 region
QHYGNSPYT

SEQ ID NO: 16599 - protein, 9 aa, Artificial Sequence
  Synthetic polypeptide representing artificial human antibody CDR-L3 region
QQYDNLPYT

SEQ ID NO: 16600 - protein, 9 aa, Artificial Sequence
  Synthetic polypeptide representing artificial human antibody CDR-L3 region
QSYDSSNQV

SEQ ID NO: 16601 - protein, 8 aa, Artificial Sequence
  Synthetic polypeptide representing artificial human antibody CDR-L3 region
QQSYSTLT

SEQ ID NO: 16602 - protein, 9 aa, Artificial Sequence
  Synthetic polypeptide representing artificial human antibody CDR-L3 region
MQGTHWSYT

SEQ ID NO: 16603 - protein, 9 aa, Artificial Sequence
  Synthetic polypeptide representing artificial human antibody CDR-L3 region
QQRSNWPLT

SEQ ID NO: 16604 - protein, 11 aa, Artificial Sequence
  Synthetic polypeptide representing artificial human antibody CDR-L3 region
NSRDSSGNHLV

SEQ ID NO: 16605 - protein, 11 aa, Artificial Sequence
  Synthetic polypeptide representing artificial human antibody CDR-L3 region
GTWDTSLSEYV

SEQ ID NO: 16606 - protein, 11 aa, Artificial Sequence
  Synthetic polypeptide representing artificial human antibody CDR-L3 region
AAWDDSLSGVV

SEQ ID NO: 16607 - protein, 11 aa, Artificial Sequence
  Synthetic polypeptide representing artificial human antibody CDR-L3 region
GTWDSSLSAGV

SEQ ID NO: 16608 - protein, 9 aa, Artificial Sequence
  Synthetic polypeptide representing artificial human antibody CDR-L3 region
QQYGSSTGT

SEQ ID NO: 16609 - protein, 9 aa, Artificial Sequence
  Synthetic polypeptide representing artificial human antibody CDR-L3 region
LQDYQYPLT

SEQ ID NO: 16610 - protein, 12 aa, Artificial Sequence
  Synthetic polypeptide representing artificial human antibody CDR-L3 region
QTYDTRLSGSYV

SEQ ID NO: 16611 - protein, 9 aa, Artificial Sequence
  Synthetic polypeptide representing artificial human antibody CDR-L3 region
QKYNSAPWT

SEQ ID NO: 16612 - protein, 9 aa, Artificial Sequence
  Synthetic polypeptide representing artificial human antibody CDR-L3 region
QQTKTFPYT

SEQ ID NO: 16613 - protein, 10 aa, Artificial Sequence
  Synthetic polypeptide representing artificial human antibody CDR-L3 region
SSYTSSSTVV

SEQ ID NO: 16614 - protein, 9 aa, Artificial Sequence
  Synthetic polypeptide representing artificial human antibody CDR-L3 region
QAWDSSSVV

SEQ ID NO: 16615 - protein, 12 aa, Artificial Sequence
  Synthetic polypeptide representing artificial human antibody CDR-L3 region
QSYDSSLSGWVV

SEQ ID NO: 16616 - protein, 9 aa, Artificial Sequence
  Synthetic polypeptide representing artificial human antibody CDR-L3 region
QQYDNSPRT

SEQ ID NO: 16617 - protein, 9 aa, Artificial Sequence
  Synthetic polypeptide representing artificial human antibody CDR-L3 region
MQATHFPRT

SEQ ID NO: 16618 - protein, 9 aa, Artificial Sequence
  Synthetic polypeptide representing artificial human antibody CDR-L3 region
QQTNSFPYT

SEQ ID NO: 16619 - protein, 9 aa, Artificial Sequence
  Synthetic polypeptide representing artificial human antibody CDR-L3 region
LLYYGGAWV

SEQ ID NO: 16620 - protein, 10 aa, Artificial Sequence
  Synthetic polypeptide representing artificial human antibody CDR-L3 region
QQFGSSPLYT

SEQ ID NO: 16621 - protein, 9 aa, Artificial Sequence
  Synthetic polypeptide representing artificial human antibody CDR-L3 region
QQYYSTPYT

SEQ ID NO: 16622 - protein, 8 aa, Artificial Sequence
  Synthetic polypeptide representing artificial human antibody CDR-L3 region
LQYKSSYC

SEQ ID NO: 16623 - protein, 10 aa, Artificial Sequence
  Synthetic polypeptide representing artificial human antibody CDR-L3 region
QQYNNWPPIT

SEQ ID NO: 16624 - protein, 11 aa, Artificial Sequence
  Synthetic polypeptide representing artificial human antibody CDR-L3 region
YSTDSSGNHRV

SEQ ID NO: 16625 - protein, 11 aa, Artificial Sequence
  Synthetic polypeptide representing artificial human antibody CDR-L3 region
QAWDGSIEGYV

SEQ ID NO: 16626 - protein, 11 aa, Artificial Sequence
  Synthetic polypeptide representing artificial human antibody CDR-L3 region
QSADSSGTYVV

SEQ ID NO: 16627 - protein, 10 aa, Artificial Sequence
  Synthetic polypeptide representing artificial human antibody CDR-L3 region
CSYAGSITYV

SEQ ID NO: 16628 - protein, 8 aa, Artificial Sequence
  Synthetic polypeptide representing artificial human antibody CDR-L3 region
QQYGSSYT

SEQ ID NO: 16629 - protein, 9 aa, Artificial Sequence
  Synthetic polypeptide representing artificial human antibody CDR-L3 region
QQYDDWPLT

SEQ ID NO: 16630 - protein, 11 aa, Artificial Sequence
  Synthetic polypeptide representing artificial human antibody CDR-L3 region
QVWDSSSDHVV

SEQ ID NO: 16631 - protein, 9 aa, Artificial Sequence
  Synthetic polypeptide representing artificial human antibody CDR-L3 region
MQALQTPWT

SEQ ID NO: 16632 - protein, 11 aa, Artificial Sequence
  Synthetic polypeptide representing artificial human antibody CDR-L3 region
GTWDSSLSAGV

SEQ ID NO: 16633 - protein, 10 aa, Artificial Sequence
  Synthetic polypeptide representing artificial human antibody CDR-L3 region
QSYDSSNPVV

SEQ ID NO: 16634 - protein, 9 aa, Artificial Sequence
  Synthetic polypeptide representing artificial human antibody CDR-L3 region
QAWDSSTVV

SEQ ID NO: 16635 - protein, 11 aa, Artificial Sequence
  Synthetic polypeptide representing artificial human antibody CDR-L3 region
AAWDDSLSGRV

SEQ ID NO: 16636 - protein, 9 aa, Artificial Sequence
  Synthetic polypeptide representing artificial human antibody CDR-L3 region
QSYDSSNVV

SEQ ID NO: 16637 - protein, 10 aa, Artificial Sequence
  Synthetic polypeptide representing artificial human antibody CDR-L3 region
YSAADNNLGV

SEQ ID NO: 16638 - protein, 11 aa, Artificial Sequence
  Synthetic polypeptide representing artificial human antibody CDR-L3 region
NSRDSSGNHYV

SEQ ID NO: 16639 - protein, 9 aa, Artificial Sequence
  Synthetic polypeptide representing artificial human antibody CDR-L3 region
QAWDSSTVV

SEQ ID NO: 16640 - protein, 9 aa, Artificial Sequence
  Synthetic polypeptide representing artificial human antibody CDR-L3 region
QQANSFPLT

SEQ ID NO: 16641 - protein, 11 aa, Artificial Sequence
  Synthetic polypeptide representing artificial human antibody CDR-L3 region
GTWDSSLSAYV

SEQ ID NO: 16642 - protein, 9 aa, Artificial Sequence
  Synthetic polypeptide representing artificial human antibody CDR-L3 region
QSYDSSNWV

SEQ ID NO: 16643 - protein, 9 aa, Artificial Sequence
  Synthetic polypeptide representing artificial human antibody CDR-L3 region
MQALQTPIT

SEQ ID NO: 16644 - protein, 10 aa, Artificial Sequence
  Synthetic polypeptide representing artificial human antibody CDR-L3 region
QQFGSSPWGT

SEQ ID NO: 16645 - protein, 10 aa, Artificial Sequence
  Synthetic polypeptide representing artificial human antibody CDR-L3 region
SSYTSSSTYV

SEQ ID NO: 16646 - protein, 9 aa, Artificial Sequence
  Synthetic polypeptide representing artificial human antibody CDR-L3 region
LQDYNYPFI

SEQ ID NO: 16647 - protein, 11 aa, Artificial Sequence
  Synthetic polypeptide representing artificial human antibody CDR-L3 region
GTWDSSLSAGV

SEQ ID NO: 16648 - protein, 12 aa, Artificial Sequence
  Synthetic polypeptide representing artificial human antibody CDR-L3 region
NSRDSSGNHLGV

SEQ ID NO: 16649 - protein, 10 aa, Artificial Sequence
  Synthetic polypeptide representing artificial human antibody CDR-L3 region
QSADSSGTYV

SEQ ID NO: 16650 - protein, 9 aa, Artificial Sequence
  Synthetic polypeptide representing artificial human antibody CDR-L3 region
LQDYNYPLT

SEQ ID NO: 16651 - protein, 9 aa, Artificial Sequence
  Synthetic polypeptide representing artificial human antibody CDR-L3 region
QQYNSYSYT

SEQ ID NO: 16652 - protein, 10 aa, Artificial Sequence
  Synthetic polypeptide representing artificial human antibody CDR-L3 region
QSYDSSLSGV

SEQ ID NO: 16653 - protein, 9 aa, Artificial Sequence
  Synthetic polypeptide representing artificial human antibody CDR-L3 region
MQATQFPYT

SEQ ID NO: 16654 - protein, 10 aa, Artificial Sequence
  Synthetic polypeptide representing artificial human antibody CDR-L3 region
SSYTSSSTYV

SEQ ID NO: 16655 - protein, 9 aa, Artificial Sequence
  Synthetic polypeptide representing artificial human antibody CDR-L3 region
QQYNNWPRT

SEQ ID NO: 16656 - protein, 10 aa, Artificial Sequence [sequence omitted]

SEQ ID NO: 16657 - protein, 9 aa, Artificial Sequence
  Synthetic polypeptide representing artificial human antibody CDR-L3 region
QQYDNLPLT

SEQ ID NO: 16658 - protein, 11 aa, Artificial Sequence
  Synthetic polypeptide representing artificial human antibody CDR-L3 region
GTWDSSLSAGV

SEQ ID NO: 16659 - protein, 9 aa, Artificial Sequence
  Synthetic polypeptide representing artificial human antibody CDR-L3 region
QQYNSPLWT

SEQ ID NO: 16660 - protein, 10 aa, Artificial Sequence
  Synthetic polypeptide representing artificial human antibody CDR-L3 region
LLSYSGAYAV

SEQ ID NO: 16661 - protein, 9 aa, Artificial Sequence
  Synthetic polypeptide representing artificial human antibody CDR-L3 region
MQALQTPIT

SEQ ID NO: 16662 - protein, 9 aa, Artificial Sequence
  Synthetic polypeptide representing artificial human antibody CDR-L3 region
QQYDVWPLT

SEQ ID NO: 16663 - protein, 9 aa, Artificial Sequence
  Synthetic polypeptide representing artificial human antibody CDR-L3 region
QQYYSTPST

SEQ ID NO: 16664 - protein, 9 aa, Artificial Sequence
  Synthetic polypeptide representing artificial human antibody CDR-L3 region
QQYYSTPRT

SEQ ID NO: 16665 - protein, 9 aa, Artificial Sequence
  Synthetic polypeptide representing artificial human antibody CDR-L3 region
QTWGTGTVV

SEQ ID NO: 16666 - protein, 9 aa, Artificial Sequence
  Synthetic polypeptide representing artificial human antibody CDR-L3 region
SSYTSSTVV

SEQ ID NO: 16667 - protein, 11 aa, Artificial Sequence
  Synthetic polypeptide representing artificial human antibody CDR-L3 region
QSADSSGTYVV

SEQ ID NO: 16668 - protein, 9 aa, Artificial Sequence
  Synthetic polypeptide representing artificial human antibody CDR-L3 region
EQYDKFPIT

SEQ ID NO: 16669 - protein, 11 aa, Artificial Sequence
  Synthetic polypeptide representing artificial human antibody CDR-L3 region
QVWDSSSDHWV

SEQ ID NO: 16670 - protein, 10 aa, Artificial Sequence
  Synthetic polypeptide representing artificial human antibody CDR-L3 region
SSYTSSSTLV

SEQ ID NO: 16671 - protein, 9 aa, Artificial Sequence
  Synthetic polypeptide representing artificial human antibody CDR-L3 region
MQATQFPLT

SEQ ID NO: 16672 - protein, 12 aa, Artificial Sequence
  Synthetic polypeptide representing artificial human antibody CDR-L3 region
GTWDSSLSAEVV

SEQ ID NO: 16673 - protein, 10 aa, Artificial Sequence [sequence omitted]

SEQ ID NO: 16674 - protein, 9 aa, Artificial Sequence
  Synthetic polypeptide representing artificial human antibody CDR-L3 region
QQSYSTPLT

SEQ ID NO: 16675 - protein, 8 aa, Artificial Sequence
  Synthetic polypeptide representing artificial human antibody CDR-L3 region
QVWDSSVV

SEQ ID NO: 16676 - protein, 8 aa, Artificial Sequence
  Synthetic polypeptide representing artificial human antibody CDR-L3 region
QQYYSYPT

SEQ ID NO: 16677 - protein, 11 aa, Artificial Sequence
  Synthetic polypeptide representing artificial human antibody CDR-L3 region
QSADSSGTYWV

SEQ ID NO: 16678 - protein, 12 aa, Artificial Sequence
  Synthetic polypeptide representing artificial human antibody CDR-L3 region
AAWDDSLSGLWV

SEQ ID NO: 16679 - protein, 11 aa, Artificial Sequence
  Synthetic polypeptide representing artificial human antibody CDR-L3 region
QQYNNWPQVYT

SEQ ID NO: 16680 - protein, 9 aa, Artificial Sequence
  Synthetic polypeptide representing artificial human antibody CDR-L3 region
MQGTLWPPT

SEQ ID NO: 16681 - protein, 9 aa, Artificial Sequence
  Synthetic polypeptide representing artificial human antibody CDR-L3 region
MQATHFPRT

SEQ ID NO: 16682 - protein, 8 aa, Artificial Sequence
  Synthetic polypeptide representing artificial human antibody CDR-L3 region
QQSYSTPT

SEQ ID NO: 16683 - protein, 9 aa, Artificial Sequence
  Synthetic polypeptide representing artificial human antibody CDR-L3 region
MQALQTPLT

SEQ ID NO: 16684 - protein, 11 aa, Artificial Sequence
  Synthetic polypeptide representing artificial human antibody CDR-L3 region
QSYDSSLSASV

SEQ ID NO: 16685 - protein, 11 aa, Artificial Sequence
  Synthetic polypeptide representing artificial human antibody CDR-L3 region
AAWDDSLNGWV

SEQ ID NO: 16686 - protein, 8 aa, Artificial Sequence
  Synthetic polypeptide representing artificial human antibody CDR-L3 region
QAWDSSIV

SEQ ID NO: 16687 - protein, 11 aa, Artificial Sequence
  Synthetic polypeptide representing artificial human antibody CDR-L3 region
AAWDDSLSGVV

SEQ ID NO: 16688 - protein, 11 aa, Artificial Sequence
  Synthetic polypeptide representing artificial human antibody CDR-L3 region
GTWDSSLSAYV

SEQ ID NO: 16689 - protein, 9 aa, Artificial Sequence
  Synthetic polypeptide representing artificial human antibody CDR-L3 region
QQYNSYSWT

SEQ ID NO: 16690 - protein, 11 aa, Artificial Sequence
  Synthetic polypeptide representing artificial human antibody CDR-L3 region
AAWDDSLNGWV

SEQ ID NO: 16691 - protein, 9 aa, Artificial Sequence
  Synthetic polypeptide representing artificial human antibody CDR-L3 region
QQVDSYPNT

SEQ ID NO: 16692 - protein, 9 aa, Artificial Sequence
  Synthetic polypeptide representing artificial human antibody CDR-L3 region
QQYHDWPIT

SEQ ID NO: 16693 - protein, 9 aa, Artificial Sequence
  Synthetic polypeptide representing artificial human antibody CDR-L3 region
QQYGSSPLT

SEQ ID NO: 16694 - protein, 11 aa, Artificial Sequence
  Synthetic polypeptide representing artificial human antibody CDR-L3 region
GTWDSSLSAYV

SEQ ID NO: 16695 - protein, 10 aa, Artificial Sequence
  Synthetic polypeptide representing artificial human antibody CDR-L3 region
AAWDDSLNRV

SEQ ID NO: 16696 - protein, 9 aa, Artificial Sequence
  Synthetic polypeptide representing artificial human antibody CDR-L3 region
QQYYSTPWT

SEQ ID NO: 16697 - protein, 11 aa, Artificial Sequence
  Synthetic polypeptide representing artificial human antibody CDR-L3 region
GTWDSSLSAYV

SEQ ID NO: 16698 - protein, 10 aa, Artificial Sequence
  Synthetic polypeptide representing artificial human antibody CDR-L3 region
SSYAGSNNVV

SEQ ID NO: 16699 - protein, 11 aa, Artificial Sequence
  Synthetic polypeptide representing artificial human antibody CDR-L3 region
QQSYSTPPMYT

SEQ ID NO: 16700 - protein, 11 aa, Artificial Sequence
  Synthetic polypeptide representing artificial human antibody CDR-L3 region
AAWDDSLNGPV

SEQ ID NO: 16701 - protein, 9 aa, Artificial Sequence
  Synthetic polypeptide representing artificial human antibody CDR-L3 region
QQRSAWPLT

SEQ ID NO: 16702 - protein, 11 aa, Artificial Sequence
  Synthetic polypeptide representing artificial human antibody CDR-L3 region
SSYTSSSTLVV

SEQ ID NO: 16703 - protein, 11 aa, Artificial Sequence
  Synthetic polypeptide representing artificial human antibody CDR-L3 region
AAWDDSLKGLG

SEQ ID NO: 16704 - protein, 10 aa, Artificial Sequence
  Synthetic polypeptide representing artificial human antibody CDR-L3 region
SSYTSSSTLV

SEQ ID NO: 16705 - protein, 9 aa, Artificial Sequence
  Synthetic polypeptide representing artificial human antibody CDR-L3 region
QQYNSYSYT

SEQ ID NO: 16706 - protein, 13 aa, Artificial Sequence
  Synthetic polypeptide representing artificial human antibody CDR-L3 region
ASWDDSLTGPNYV

SEQ ID NO: 16707 - protein, 9 aa, Artificial Sequence
  Synthetic polypeptide representing artificial human antibody CDR-L3 region
QQRSNWPST

SEQ ID NO: 16708 - protein, 10 aa, Artificial Sequence
  Synthetic polypeptide representing artificial human antibody CDR-L3 region
CSYAGSYTYV

SEQ ID NO: 16709 - protein, 11 aa, Artificial Sequence
  Synthetic polypeptide representing artificial human antibody CDR-L3 region
NSRDSSGNHWV

SEQ ID NO: 16710 - protein, 10 aa, Artificial Sequence
  Synthetic polypeptide representing artificial human antibody CDR-L3 region
SSYTSSSTVV

SEQ ID NO: 16711 - protein, 11 aa, Artificial Sequence
  Synthetic polypeptide representing artificial human antibody CDR-L3 region
QVWDSSSDHWV

SEQ ID NO: 16712 - protein, 10 aa, Artificial Sequence
  Synthetic polypeptide representing artificial human antibody CDR-L3 region
QQFDYSPRWT

SEQ ID NO: 16713 - protein, 9 aa, Artificial Sequence
  Synthetic polypeptide representing artificial human antibody CDR-L3 region
QAWDSSTVV

SEQ ID NO: 16714 - protein, 11 aa, Artificial Sequence
  Synthetic polypeptide representing artificial human antibody CDR-L3 region
SSRDRSGSHVV

SEQ ID NO: 16715 - protein, 10 aa, Artificial Sequence
  Synthetic polypeptide representing artificial human antibody CDR-L3 region
QQYNEWPRIT

SEQ ID NO: 16716 - protein, 9 aa, Artificial Sequence
  Synthetic polypeptide representing artificial human antibody CDR-L3 region
QQYGSSPLT

SEQ ID NO: 16717 - protein, 11 aa, Artificial Sequence
  Synthetic polypeptide representing artificial human antibody CDR-L3 region
QVWDSSSDHWV

SEQ ID NO: 16718 - protein, 12 aa, Artificial Sequence
  Synthetic polypeptide representing artificial human antibody CDR-L3 region
QSYDSSLSGWVV

SEQ ID NO: 16719 - protein, 11 aa, Artificial Sequence
  Synthetic polypeptide representing artificial human antibody CDR-L3 region
AAWDDSLNAWV

SEQ ID NO: 16720 - protein, 10 aa, Artificial Sequence
  Synthetic polypeptide representing artificial human antibody CDR-L3 region
ATWDTSLSVV

SEQ ID NO: 16721 - protein, 9 aa, Artificial Sequence
  Synthetic polypeptide representing artificial human antibody CDR-L3 region
QAVDGKNYV

SEQ ID NO: 16722 - protein, 11 aa, Artificial Sequence
  Synthetic polypeptide representing artificial human antibody CDR-L3 region
AAWDDSLNGWV

SEQ ID NO: 16723 - protein, 11 aa, Artificial Sequence
  Synthetic polypeptide representing artificial human antibody CDR-L3 region
QSADSSGPLYV

SEQ ID NO: 16724 - protein, 9 aa, Artificial Sequence
  Synthetic polypeptide representing artificial human antibody CDR-L3 region
QQYGSSPWT

SEQ ID NO: 16725 - protein, 9 aa, Artificial Sequence
  Synthetic polypeptide representing artificial human antibody CDR-L3 region
QQYYSTPYT

SEQ ID NO: 16726 - protein, 11 aa, Artificial Sequence
  Synthetic polypeptide representing artificial human antibody CDR-L3 region
GTWDSSLSAGV

SEQ ID NO: 16727 - protein, 9 aa, Artificial Sequence
  Synthetic polypeptide representing artificial human antibody CDR-L3 region
QQYGSSPGT

SEQ ID NO: 16728 - protein, 9 aa, Artificial Sequence
  Synthetic polypeptide representing artificial human antibody CDR-L3 region
QQSYSTPYT

SEQ ID NO: 16729 - protein, 11 aa, Artificial Sequence
  Synthetic polypeptide representing artificial human antibody CDR-L3 region
QVWDSSSDHVV

SEQ ID NO: 16730 - protein, 9 aa, Artificial Sequence
  Synthetic polypeptide representing artificial human antibody CDR-L3 region
LLSYSGTWV

SEQ ID NO: 16731 - protein, 9 aa, Artificial Sequence
  Synthetic polypeptide representing artificial human antibody CDR-L3 region
QQYGSSPYT

SEQ ID NO: 16732 - protein, 10 aa, Artificial Sequence
  Synthetic polypeptide representing artificial human antibody CDR-L3 region
QQYNNWPPYT

SEQ ID NO: 16733 - protein, 9 aa, Artificial Sequence
  Synthetic polypeptide representing artificial human antibody CDR-L3 region
LQHNSYPPT

SEQ ID NO: 16734 - protein, 9 aa, Artificial Sequence
  Synthetic polypeptide representing artificial human antibody CDR-L3 region
QQYNSYPYT

SEQ ID NO: 16735 - protein, 9 aa, Artificial Sequence
  Synthetic polypeptide representing artificial human antibody CDR-L3 region
MQSIQLPYT

SEQ ID NO: 16736 - protein, 11 aa, Artificial Sequence
  Synthetic polypeptide representing artificial human antibody CDR-L3 region
QVWDSSSDHYV

SEQ ID NO: 16737 - protein, 9 aa, Artificial Sequence
  Synthetic polypeptide representing artificial human antibody CDR-L3 region
QQSYSTPRT

SEQ ID NO: 16738 - protein, 10 aa, Artificial Sequence
  Synthetic polypeptide representing artificial human antibody CDR-L3 region
SSYTSSSTYV

SEQ ID NO: 16739 - protein, 9 aa, Artificial Sequence
  Synthetic polypeptide representing artificial human antibody CDR-L3 region
QQRSNWPLT

SEQ ID NO: 16740 - protein, 9 aa, Artificial Sequence
  Synthetic polypeptide representing artificial human antibody CDR-L3 region
HQFGDPPYT

SEQ ID NO: 16741 - protein, 9 aa, Artificial Sequence
  Synthetic polypeptide representing artificial human antibody CDR-L3 region
MQALQTPPT

SEQ ID NO: 16742 - protein, 9 aa, Artificial Sequence
  Synthetic polypeptide representing artificial human antibody CDR-L3 region
QSYDSSNVV

SEQ ID NO: 16743 - protein, 9 aa, Artificial Sequence
  Synthetic polypeptide representing artificial human antibody CDR-L3 region
QQFGTSPET

SEQ ID NO: 16744 - protein, 9 aa, Artificial Sequence
  Synthetic polypeptide representing artificial human antibody CDR-L3 region
MQALQTPLT

SEQ ID NO: 16745 - protein, 9 aa, Artificial Sequence
  Synthetic polypeptide representing artificial human antibody CDR-L3 region
QAWDSSIVV

SEQ ID NO: 16746 - protein, 9 aa, Artificial Sequence
  Synthetic polypeptide representing artificial human antibody CDR-L3 region
MQGTHWPRT

SEQ ID NO: 16747 - protein, 9 aa, Artificial Sequence
  Synthetic polypeptide representing artificial human antibody CDR-L3 region
QAWDSSTVV

SEQ ID NO: 16748 - protein, 11 aa, Artificial Sequence
  Synthetic polypeptide representing artificial human antibody CDR-L3 region
QVWDTSSDEWV

SEQ ID NO: 16749 - protein, 10 aa, Artificial Sequence
  Synthetic polypeptide representing artificial human antibody CDR-L3 region
QQYNDWPPWT

SEQ ID NO: 16750 - protein, 9 aa, Artificial Sequence
  Synthetic polypeptide representing artificial human antibody CDR-L3 region
QQYGSSPLT

SEQ ID NO: 16751 - protein, 9 aa, Artificial Sequence
  Synthetic polypeptide representing artificial human antibody CDR-L3 region
QQYNSYPFT

SEQ ID NO: 16752 - protein, 10 aa, Artificial Sequence
  Synthetic polypeptide representing artificial human antibody CDR-L3 region
QQYNNWPPYT

SEQ ID NO: 16753 - protein, 11 aa, Artificial Sequence
  Synthetic polypeptide representing artificial human antibody CDR-L3 region
QSADSSGTYVV

SEQ ID NO: 16754 - protein, 9 aa, Artificial Sequence
  Synthetic polypeptide representing artificial human antibody CDR-L3 region
QQYNNWPLT

SEQ ID NO: 16755 - protein, 11 aa, Artificial Sequence
  Synthetic polypeptide representing artificial human antibody CDR-L3 region
QVWDSSSDSYV

SEQ ID NO: 16756 - protein, 9 aa, Artificial Sequence
  Synthetic polypeptide representing artificial human antibody CDR-L3 region
QQSYSTPDT

SEQ ID NO: 16757 - protein, 9 aa, Artificial Sequence
  Synthetic polypeptide representing artificial human antibody CDR-L3 region
QSYDSSTWV

SEQ ID NO: 16758 - protein, 11 aa, Artificial Sequence
  Synthetic polypeptide representing artificial human antibody CDR-L3 region
QSYNNVSPMYI

SEQ ID NO: 16759 - protein, 10 aa, Artificial Sequence
  Synthetic polypeptide representing artificial human antibody CDR-L3 region
YSTDSSGTRV

SEQ ID NO: 16760 - protein, 8 aa, Artificial Sequence
  Synthetic polypeptide representing artificial human antibody CDR-L3 region
LQYNSYWT

SEQ ID NO: 16761 - protein, 11 aa, Artificial Sequence
  Synthetic polypeptide representing artificial human antibody CDR-L3 region
GSYSTTTTLGL

SEQ ID NO: 16762 - protein, 10 aa, Artificial Sequence
  Synthetic polypeptide representing artificial human antibody CDR-L3 region
QQYNNWPLYT

SEQ ID NO: 16763 - protein, 11 aa, Artificial Sequence
  Synthetic polypeptide representing artificial human antibody CDR-L3 region
SSYTSSSTPYV

SEQ ID NO: 16764 - protein, 9 aa, Artificial Sequence
  Synthetic polypeptide representing artificial human antibody CDR-L3 region
QQFNIFPPH

SEQ ID NO: 16765 - protein, 11 aa, Artificial Sequence
  Synthetic polypeptide representing artificial human antibody CDR-L3 region
AAWDDSLSGYL

SEQ ID NO: 16766 - protein, 11 aa, Artificial Sequence
  Synthetic polypeptide representing artificial human antibody CDR-L3 region
AAWDDSLSGVV

SEQ ID NO: 16767 - protein, 11 aa, Artificial Sequence
  Synthetic polypeptide representing artificial human antibody CDR-L3 region
AAWDDSLSGWV

SEQ ID NO: 16768 - protein, 11 aa, Artificial Sequence
  Synthetic polypeptide representing artificial human antibody CDR-L3 region
AAWDDSLSGPV

SEQ ID NO: 16769 - protein, 9 aa, Artificial Sequence
  Synthetic polypeptide representing artificial human antibody CDR-L3 region
QQYGSSPQT

SEQ ID NO: 16770 - protein, 9 aa, Artificial Sequence
  Synthetic polypeptide representing artificial human antibody CDR-L3 region
QQLNSYPYT

SEQ ID NO: 16771 - protein, 10 aa, Artificial Sequence
  Synthetic polypeptide representing artificial human antibody CDR-L3 region
SSYTSSSTLV

SEQ ID NO: 16772 - protein, 9 aa, Artificial Sequence
  Synthetic polypeptide representing artificial human antibody CDR-L3 region
QKYKSAPYT

SEQ ID NO: 16773 - protein, 9 aa, Artificial Sequence
  Synthetic polypeptide representing artificial human antibody CDR-L3 region
QQYDNPSIT

SEQ ID NO: 16774 - protein, 11 aa, Artificial Sequence
  Synthetic polypeptide representing artificial human antibody CDR-L3 region
QSADSSGTYVV

SEQ ID NO: 16775 - protein, 9 aa, Artificial Sequence
  Synthetic polypeptide representing artificial human antibody CDR-L3 region
MQALQTPLT

SEQ ID NO: 16776 - protein, 11 aa, Artificial Sequence
  Synthetic polypeptide representing artificial human antibody CDR-L3 region
QVWDSSSDHRV

SEQ ID NO: 16777 - protein, 5 aa, Artificial Sequence
  Synthetic polypeptide representing artificial human antibody CDR-L3 region
QHRRT

SEQ ID NO: 16778 - protein, 9 aa, Artificial Sequence
  Synthetic polypeptide representing artificial human antibody CDR-L3 region
QQYNSYPYT

SEQ ID NO: 16779 - protein, 11 aa, Artificial Sequence
  Synthetic polypeptide representing artificial human antibody CDR-L3 region
QVWDSSSDHVV

SEQ ID NO: 16780 - protein, 10 aa, Artificial Sequence
  Synthetic polypeptide representing artificial human antibody CDR-L3 region
QQSYSDTRVT

SEQ ID NO: 16781 - protein, 12 aa, Artificial Sequence
  Synthetic polypeptide representing artificial human antibody CDR-L3 region
QQRSNWPPGALT

SEQ ID NO: 16782 - protein, 9 aa, Artificial Sequence
  Synthetic polypeptide representing artificial human antibody CDR-L3 region
MQALQTPFT

SEQ ID NO: 16783 - protein, 9 aa, Artificial Sequence
  Synthetic polypeptide representing artificial human antibody CDR-L3 region
MQALQTPHT

SEQ ID NO: 16784 - protein, 10 aa, Artificial Sequence
  Synthetic polypeptide representing artificial human antibody CDR-L3 region
QQSYSTLMYT

SEQ ID NO: 16785 - protein, 10 aa, Artificial Sequence
  Synthetic polypeptide representing artificial human antibody CDR-L3 region
QAWDSSTNYV

SEQ ID NO: 16786 - protein, 11 aa, Artificial Sequence
  Synthetic polypeptide representing artificial human antibody CDR-L3 region
QVWDSSSDHVV

SEQ ID NO: 16787 - protein, 10 aa, Artificial Sequence
  Synthetic polypeptide representing artificial human antibody CDR-L3 region
AAWDDSLSGP

SEQ ID NO: 16788 - protein, 9 aa, Artificial Sequence
  Synthetic polypeptide representing artificial human antibody CDR-L3 region
QKYNSAPWT

SEQ ID NO: 16789 - protein, 9 aa, Artificial Sequence
  Synthetic polypeptide representing artificial human antibody CDR-L3 region
QQHDNLPLT

SEQ ID NO: 16790 - protein, 9 aa, Artificial Sequence
  Synthetic polypeptide representing artificial human antibody CDR-L3 region
QQYNNWPRT

SEQ ID NO: 16791 - protein, 9 aa, Artificial Sequence
  Synthetic polypeptide representing artificial human antibody CDR-L3 region
QQANSFPLT

SEQ ID NO: 16792 - protein, 9 aa, Artificial Sequence
  Synthetic polypeptide representing artificial human antibody CDR-L3 region
QQYGSSLYT

SEQ ID NO: 16793 - protein, 13 aa, Artificial Sequence
  Synthetic polypeptide representing artificial human antibody CDR-L3 region
QSADSSGTYPNWV

SEQ ID NO: 16794 - protein, 9 aa, Artificial Sequence
  Synthetic polypeptide representing artificial human antibody CDR-L3 region
QQYDNLMYT

SEQ ID NO: 16795 - protein, 11 aa, Artificial Sequence
  Synthetic polypeptide representing artificial human antibody CDR-L3 region
CSYAGSSTSLV

SEQ ID NO: 16796 - protein, 9 aa, Artificial Sequence
  Synthetic polypeptide representing artificial human antibody CDR-L3 region
QSYDSSNVV

SEQ ID NO: 16797 - protein, 8 aa, Artificial Sequence
  Synthetic polypeptide representing artificial human antibody CDR-L3 region
QQYDNLRT

SEQ ID NO: 16798 - protein, 9 aa, Artificial Sequence
  Synthetic polypeptide representing artificial human antibody CDR-L3 region
LQHNSYPLT

SEQ ID NO: 16799 - protein, 9 aa, Artificial Sequence
  Synthetic polypeptide representing artificial human antibody CDR-L3 region
MEGLQTPPT

SEQ ID NO: 16800 - protein, 5 aa, Artificial Sequence
  Synthetic polypeptide representing artificial human antibody CDR-L3 region
QQRGP

SEQ ID NO: 16801 - protein, 9 aa, Artificial Sequence
  Synthetic polypeptide representing artificial human antibody CDR-L3 region
QQNYRNPQT

SEQ ID NO: 16802 - protein, 9 aa, Artificial Sequence
  Synthetic polypeptide representing artificial human antibody CDR-L3 region
QQYSSLPRT

SEQ ID NO: 16803 - protein, 11 aa, Artificial Sequence
  Synthetic polypeptide representing artificial human antibody CDR-L3 region
QVWDSSSDHGV

SEQ ID NO: 16804 - protein, 9 aa, Artificial Sequence
  Synthetic polypeptide representing artificial human antibody CDR-L3 region
QAWDSSTVV

SEQ ID NO: 16805 - protein, 9 aa, Artificial Sequence
  Synthetic polypeptide representing artificial human antibody CDR-L3 region
HQYDNLPFT

SEQ ID NO: 16806 - protein, 12 aa, Artificial Sequence
  Synthetic polypeptide representing artificial human antibody CDR-L3 region
NSRDSSGNHLYV

SEQ ID NO: 16807 - protein, 10 aa, Artificial Sequence
  Synthetic polypeptide representing artificial human antibody CDR-L3 region
QQYNNWPPYT

SEQ ID NO: 16808 - protein, 10 aa, Artificial Sequence
  Synthetic polypeptide representing artificial human antibody CDR-L3 region
MQGTHWPPCT

SEQ ID NO: 16809 - protein, 10 aa, Artificial Sequence
  Synthetic polypeptide representing artificial human antibody CDR-L3 region
QAWDSSTAWV

SEQ ID NO: 16810 - protein, 11 aa, Artificial Sequence
  Synthetic polypeptide representing artificial human antibody CDR-L3 region
GSWDSLNALFV

SEQ ID NO: 16811 - protein, 8 aa, Artificial Sequence
  Synthetic polypeptide representing artificial human antibody CDR-L3 region
HQYGSSHT

SEQ ID NO: 16812 - protein, 9 aa, Artificial Sequence
  Synthetic polypeptide representing artificial human antibody CDR-L3 region
QQANSFPRT

SEQ ID NO: 16813 - protein, 9 aa, Artificial Sequence
  Synthetic polypeptide representing artificial human antibody CDR-L3 region
LQGGSSPLT

SEQ ID NO: 16814 - protein, 9 aa, Artificial Sequence
  Synthetic polypeptide representing artificial human antibody CDR-L3 region
QQYGSSPWT

SEQ ID NO: 16815 - protein, 10 aa, Artificial Sequence
  Synthetic polypeptide representing artificial human antibody CDR-L3 region
QQYGSSPMYT

SEQ ID NO: 16816 - protein, 9 aa, Artificial Sequence
  Synthetic polypeptide representing artificial human antibody CDR-L3 region
LQYDTSPYT

SEQ ID NO: 16817 - protein, 11 aa, Artificial Sequence
  Synthetic polypeptide representing artificial human antibody CDR-L3 region
AAWDDSLSGPV

SEQ ID NO: 16818 - protein, 9 aa, Artificial Sequence
  Synthetic polypeptide representing artificial human antibody CDR-L3 region
QQFNNYPVT

SEQ ID NO: 16819 - protein, 10 aa, Artificial Sequence
  Synthetic polypeptide representing artificial human antibody CDR-L3 region
QQRYNWPPLT

SEQ ID NO: 16820 - protein, 8 aa, Artificial Sequence
  Synthetic polypeptide representing artificial human antibody CDR-L3 region
QQRSTWHT

SEQ ID NO: 16821 - protein, 11 aa, Artificial Sequence
  Synthetic polypeptide representing artificial human antibody CDR-L3 region
NSRDNSGDHYV

SEQ ID NO: 16822 - protein, 9 aa, Artificial Sequence
  Synthetic polypeptide representing artificial human antibody CDR-L3 region
MQGTHWPPT

SEQ ID NO: 16823 - protein, 10 aa, Artificial Sequence
  Synthetic polypeptide representing artificial human antibody CDR-L3 region
QQYTSSPPYT

SEQ ID NO: 16824 - protein, 9 aa, Artificial Sequence
  Synthetic polypeptide representing artificial human antibody CDR-L3 region
QQLDSVPPT

SEQ ID NO: 16825 - protein, 9 aa, Artificial Sequence
  Synthetic polypeptide representing artificial human antibody CDR-L3 region
MQGIHLPIT

SEQ ID NO: 16826 - protein, 9 aa, Artificial Sequence
  Synthetic polypeptide representing artificial human antibody CDR-L3 region
QKYERAPLT

SEQ ID NO: 16827 - protein, 10 aa, Artificial Sequence
  Synthetic polypeptide representing artificial human antibody CDR-L3 region
SSYAGSNTGV

SEQ ID NO: 16828 - protein, 9 aa, Artificial Sequence
  Synthetic polypeptide representing artificial human antibody CDR-L3 region
QTYGSAPPM

SEQ ID NO: 16829 - protein, 9 aa, Artificial Sequence
  Synthetic polypeptide representing artificial human antibody CDR-L3 region
QQYKNWPLT

SEQ ID NO: 16830 - protein, 9 aa, Artificial Sequence
  Synthetic polypeptide representing artificial human antibody CDR-L3 region
MQALQNPWT

SEQ ID NO: 16831 - protein, 9 aa, Artificial Sequence
  Synthetic polypeptide representing artificial human antibody CDR-L3 region
SLGYGDARV

SEQ ID NO: 16832 - protein, 9 aa, Artificial Sequence
  Synthetic polypeptide representing artificial human antibody CDR-L3 region
QQTHSKLWT

SEQ ID NO: 16833 - protein, 10 aa, Artificial Sequence
  Synthetic polypeptide representing artificial human antibody CDR-L3 region
ILYLGPGSWV

SEQ ID NO: 16834 - protein, 10 aa, Artificial Sequence
  Synthetic polypeptide representing artificial human antibody CDR-L3 region
SSYAGSNNVL

SEQ ID NO: 16835 - protein, 8 aa, Artificial Sequence
  Synthetic polypeptide representing artificial human antibody CDR-L3 region
QQSYTTLT

SEQ ID NO: 16836 - protein, 9 aa, Artificial Sequence
  Synthetic polypeptide representing artificial human antibody CDR-L3 region
MQALQNPWT

SEQ ID NO: 16837 - protein, 9 aa, Artificial Sequence
  Synthetic polypeptide representing artificial human antibody CDR-L3 region
LQTNNWPFT

SEQ ID NO: 16838 - protein, 13 aa, Artificial Sequence
  Synthetic polypeptide representing artificial human antibody CDR-L3 region
NSRDSSGNHLRWV

SEQ ID NO: 16839 - protein, 11 aa, Artificial Sequence
  Synthetic polypeptide representing artificial human antibody CDR-L3 region
HVWDDSSDHHV

SEQ ID NO: 16840 - protein, 9 aa, Artificial Sequence
  Synthetic polypeptide representing artificial human antibody CDR-L3 region
TQVTQFPFT

SEQ ID NO: 16841 - protein, 11 aa, Artificial Sequence
  Synthetic polypeptide representing artificial human antibody CDR-L3 region
GAWDTSLTVMM

SEQ ID NO: 16842 - protein, 9 aa, Artificial Sequence
  Synthetic polypeptide representing artificial human antibody CDR-L3 region
QQRNSWPRT

SEQ ID NO: 16843 - protein, 10 aa, Artificial Sequence
  Synthetic polypeptide representing artificial human antibody CDR-L3 region
QAWDSSTDVV

SEQ ID NO: 16844 - protein, 9 aa, Artificial Sequence
  Synthetic polypeptide representing artificial human antibody CDR-L3 region
QQYGSSPLT

SEQ ID NO: 16845 - protein, 9 aa, Artificial Sequence
  Synthetic polypeptide representing artificial human antibody CDR-L3 region
QQRSNWPLT

SEQ ID NO: 16846 - protein, 9 aa, Artificial Sequence
  Synthetic polypeptide representing artificial human antibody CDR-L3 region
MQALQPPLA

SEQ ID NO: 16847 - protein, 10 aa, Artificial Sequence
  Synthetic polypeptide representing artificial human antibody CDR-L3 region
QQYNNWPPYT

SEQ ID NO: 16848 - protein, 9 aa, Artificial Sequence
  Synthetic polypeptide representing artificial human antibody CDR-L3 region
QQYNNWPRT

SEQ ID NO: 16849 - protein, 11 aa, Artificial Sequence
  Synthetic polypeptide representing artificial human antibody CDR-L3 region
AAWDDSLSGRV

SEQ ID NO: 16850 - protein, 11 aa, Artificial Sequence
  Synthetic polypeptide representing artificial human antibody CDR-L3 region
QSADITDTYVV

SEQ ID NO: 16851 - protein, 10 aa, Artificial Sequence
  Synthetic polypeptide representing artificial human antibody CDR-L3 region
QSYDSSNCWV

SEQ ID NO: 16852 - protein, 11 aa, Artificial Sequence
  Synthetic polypeptide representing artificial human antibody CDR-L3 region
QSYDSSLSGWV

SEQ ID NO: 16853 - protein, 9 aa, Artificial Sequence
  Synthetic polypeptide representing artificial human antibody CDR-L3 region
QTWGPGFQV

SEQ ID NO: 16854 - protein, 10 aa, Artificial Sequence
  Synthetic polypeptide representing artificial human antibody CDR-L3 region
MQGTHWPPYT

SEQ ID NO: 16855 - protein, 9 aa, Artificial Sequence
  Synthetic polypeptide representing artificial human antibody CDR-L3 region
QQYYSIPWT

SEQ ID NO: 16856 - protein, 9 aa, Artificial Sequence
  Synthetic polypeptide representing artificial human antibody CDR-L3 region
LQDYNYPYT

SEQ ID NO: 16857 - protein, 9 aa, Artificial Sequence
  Synthetic polypeptide representing artificial human antibody CDR-L3 region
QQYGRSPFT

SEQ ID NO: 16858 - protein, 8 aa, Artificial Sequence
  Synthetic polypeptide representing artificial human antibody CDR-L3 region
QQSYSPFA

SEQ ID NO: 16859 - protein, 9 aa, Artificial Sequence
  Synthetic polypeptide representing artificial human antibody CDR-L3 region
QQYVDSPWT

SEQ ID NO: 16860 - protein, 9 aa, Artificial Sequence
  Synthetic polypeptide representing artificial human antibody CDR-L3 region
QQYGSTPYT

SEQ ID NO: 16861 - protein, 8 aa, Artificial Sequence
  Synthetic polypeptide representing artificial human antibody CDR-L3 region
QQYNNWLT

SEQ ID NO: 16862 - protein, 11 aa, Artificial Sequence
  Synthetic polypeptide representing artificial human antibody CDR-L3 region
QQSYSAPPVDS

SEQ ID NO: 16863 - protein, 8 aa, Artificial Sequence
  Synthetic polypeptide representing artificial human antibody CDR-L3 region
QQYNSYWT

SEQ ID NO: 16864 - protein, 10 aa, Artificial Sequence
  Synthetic polypeptide representing artificial human antibody CDR-L3 region
QQYSDYSRGT

SEQ ID NO: 16865 - protein, 10 aa, Artificial Sequence
  Synthetic polypeptide representing artificial human antibody CDR-L3 region
QQSYITPPIT

SEQ ID NO: 16866 - protein, 11 aa, Artificial Sequence
  Synthetic polypeptide representing artificial human antibody CDR-L3 region
QVWDSSSDHWV

SEQ ID NO: 16867 - protein, 10 aa, Artificial Sequence
  Synthetic polypeptide representing artificial human antibody CDR-L3 region
SSYTSSSTLV

SEQ ID NO: 16868 - protein, 9 aa, Artificial Sequence
  Synthetic polypeptide representing artificial human antibody CDR-L3 region
QAWDSSTVV

SEQ ID NO: 16869 - protein, 11 aa, Artificial Sequence
  Synthetic polypeptide representing artificial human antibody CDR-L3 region
NLWDNSSNHWL

SEQ ID NO: 16870 - protein, 11 aa, Artificial Sequence
  Synthetic polypeptide representing artificial human antibody CDR-L3 region
QSADSSGTRYV

SEQ ID NO: 16871 - protein, 9 aa, Artificial Sequence
  Synthetic polypeptide representing artificial human antibody CDR-L3 region
QQHYTIPST

SEQ ID NO: 16872 - protein, 11 aa, Artificial Sequence
  Synthetic polypeptide representing artificial human antibody CDR-L3 region
AAWDNNLSGGV

SEQ ID NO: 16873 - protein, 10 aa, Artificial Sequence
  Synthetic polypeptide representing artificial human antibody CDR-L3 region
VLYMGSGIWV

SEQ ID NO: 16874 - protein, 9 aa, Artificial Sequence
  Synthetic polypeptide representing artificial human antibody CDR-L3 region
QAWDSSIVA

SEQ ID NO: 16875 - protein, 13 aa, Artificial Sequence
  Synthetic polypeptide representing artificial human antibody CDR-L3 region
GADHGSGSNFVWV

SEQ ID NO: 16876 - protein, 9 aa, Artificial Sequence
  Synthetic polypeptide representing artificial human antibody CDR-L3 region
QQYNSYSRT

SEQ ID NO: 16877 - protein, 12 aa, Artificial Sequence
  Synthetic polypeptide representing artificial human antibody CDR-L3 region
SSYTSRSTLEVI

SEQ ID NO: 16878 - protein, 12 aa, Artificial Sequence
  Synthetic polypeptide representing artificial human antibody CDR-L3 region
QSYDSSLTRYWV

SEQ ID NO: 16879 - protein, 10 aa, Artificial Sequence
  Synthetic polypeptide representing artificial human antibody CDR-L3 region
QSYDTRMREV

SEQ ID NO: 16880 - protein, 9 aa, Artificial Sequence
  Synthetic polypeptide representing artificial human antibody CDR-L3 region
SLYYSGMRV

SEQ ID NO: 16881 - protein, 9 aa, Artificial Sequence
  Synthetic polypeptide representing artificial human antibody CDR-L3 region
MQPTHWPWT

SEQ ID NO: 16882 - protein, 9 aa, Artificial Sequence
  Synthetic polypeptide representing artificial human antibody CDR-L3 region
QKYYDWPLI

SEQ ID NO: 16883 - protein, 9 aa, Artificial Sequence
  Synthetic polypeptide representing artificial human antibody CDR-L3 region
QAWDSRTWV

SEQ ID NO: 16884 - protein, 9 aa, Artificial Sequence
  Synthetic polypeptide representing artificial human antibody CDR-L3 region
QQSYSAPFT

SEQ ID NO: 16885 - protein, 11 aa, Artificial Sequence
  Synthetic polypeptide representing artificial human antibody CDR-L3 region
NSRDSSGDHYV

SEQ ID NO: 16886 - protein, 11 aa, Artificial Sequence
  Synthetic polypeptide representing artificial human antibody CDR-L3 region
NSRDSSGDHYV

SEQ ID NO: 16887 - protein, 9 aa, Artificial Sequence
  Synthetic polypeptide representing artificial human antibody CDR-L3 region
HQRSDWPIT

SEQ ID NO: 16888 - protein, 11 aa, Artificial Sequence
  Synthetic polypeptide representing artificial human antibody CDR-L3 region
LVWDSGASAYV

SEQ ID NO: 16889 - protein, 9 aa, Artificial Sequence
  Synthetic polypeptide representing artificial human antibody CDR-L3 region
LHHGSFPYT

SEQ ID NO: 16890 - protein, 9 aa, Artificial Sequence
  Synthetic polypeptide representing artificial human antibody CDR-L3 region
LHHGSFPYT

SEQ ID NO: 16891 - protein, 9 aa, Artificial Sequence
  Synthetic polypeptide representing artificial human antibody CDR-L3 region
QAWDSSAVI

SEQ ID NO: 16892 - protein, 11 aa, Artificial Sequence
  Synthetic polypeptide representing artificial human antibody CDR-L3 region
CSYAGSYTLWV

SEQ ID NO: 16893 - protein, 9 aa, Artificial Sequence
  Synthetic polypeptide representing artificial human antibody CDR-L3 region
QTWGTGFQV

SEQ ID NO: 16894 - protein, 9 aa, Artificial Sequence
  Synthetic polypeptide representing artificial human antibody CDR-L3 region
HHYYFWPGT

SEQ ID NO: 16895 - protein, 9 aa, Artificial Sequence
  Synthetic polypeptide representing artificial human antibody CDR-L3 region
QQYYSTPYT

SEQ ID NO: 16896 - protein, 9 aa, Artificial Sequence
  Synthetic polypeptide representing artificial human antibody CDR-L3 region
QQSYSTLWT

SEQ ID NO: 16897 - protein, 9 aa, Artificial Sequence
  Synthetic polypeptide representing artificial human antibody CDR-L3 region
QQYNNWPRT

SEQ ID NO: 16898 - protein, 10 aa, Artificial Sequence
  Synthetic polypeptide representing artificial human antibody CDR-L3 region
QSYDSSLRGV

SEQ ID NO: 16899 - protein, 9 aa, Artificial Sequence
  Synthetic polypeptide representing artificial human antibody CDR-L3 region
QYYGTPPRM

SEQ ID NO: 16900 - protein, 11 aa, Artificial Sequence
  Synthetic polypeptide representing artificial human antibody CDR-L3 region
GTWDTSLNGVV

SEQ ID NO: 16901 - protein, 10 aa, Artificial Sequence
  Synthetic polypeptide representing artificial human antibody CDR-L3 region
SSYGGGNTLL

SEQ ID NO: 16902 - protein, 9 aa, Artificial Sequence
  Synthetic polypeptide representing artificial human antibody CDR-L3 region
QQSYDIPFT

SEQ ID NO: 16903 - protein, 9 aa, Artificial Sequence
  Synthetic polypeptide representing artificial human antibody CDR-L3 region
QHYFVLPYS

SEQ ID NO: 16904 - protein, 9 aa, Artificial Sequence
  Synthetic polypeptide representing artificial human antibody CDR-L3 region
QQYYSIPRT

SEQ ID NO: 16905 - protein, 9 aa, Artificial Sequence
  Synthetic polypeptide representing artificial human antibody CDR-L3 region
QQCGTSSIT

SEQ ID NO: 16906 - protein, 11 aa, Artificial Sequence
  Synthetic polypeptide representing artificial human antibody CDR-L3 region
QVWDSNTDHWV

SEQ ID NO: 16907 - protein, 12 aa, Artificial Sequence
  Synthetic polypeptide representing artificial human antibody CDR-L3 region
STWDDSLSGSVV

SEQ ID NO: 16908 - protein, 10 aa, Artificial Sequence
  Synthetic polypeptide representing artificial human antibody CDR-L3 region
VLYMGDGFWV

SEQ ID NO: 16909 - protein, 9 aa, Artificial Sequence
  Synthetic polypeptide representing artificial human antibody CDR-L3 region
LQHKSFPLT

SEQ ID NO: 16910 - protein, 9 aa, Artificial Sequence
  Synthetic polypeptide representing artificial human antibody CDR-L3 region
QAWDSSTGV

SEQ ID NO: 16911 - protein, 10 aa, Artificial Sequence
  Synthetic polypeptide representing artificial human antibody CDR-L3 region
QAWDTGTHIV

SEQ ID NO: 16912 - protein, 10 aa, Artificial Sequence
  Synthetic polypeptide representing artificial human antibody CDR-L3 region
SSYSSSSTLV

SEQ ID NO: 16913 - protein, 9 aa, Artificial Sequence
  Synthetic polypeptide representing artificial human antibody CDR-L3 region
QQTDNIPRT

SEQ ID NO: 16914 - protein, 10 aa, Artificial Sequence
  Synthetic polypeptide representing artificial human antibody CDR-L3 region
QQSFIARAYT

SEQ ID NO: 16915 - protein, 9 aa, Artificial Sequence
  Synthetic polypeptide representing artificial human antibody CDR-L3 region
QQCNDIPLT

SEQ ID NO: 16916 - protein, 10 aa, Artificial Sequence
  Synthetic polypeptide representing artificial human antibody CDR-L3 region
SSYAGSNNLV

SEQ ID NO: 16917 - protein, 9 aa, Artificial Sequence
  Synthetic polypeptide representing artificial human antibody CDR-L3 region
QQYYAIPWT

SEQ ID NO: 16918 - protein, 11 aa, Artificial Sequence
  Synthetic polypeptide representing artificial human antibody CDR-L3 region
QVWNNRRQHVI

SEQ ID NO: 16919 - protein, 8 aa, Artificial Sequence
  Synthetic polypeptide representing artificial human antibody CDR-L3 region
QQYSAYWS

SEQ ID NO: 16920 - protein, 11 aa, Artificial Sequence
  Synthetic polypeptide representing artificial human antibody CDR-L3 region
QVWDGNSAHVI

SEQ ID NO: 16921 - protein, 9 aa, Artificial Sequence
  Synthetic polypeptide representing artificial human antibody CDR-L3 region
QSSDSNILI

SEQ ID NO: 16922 - protein, 10 aa, Artificial Sequence
  Synthetic polypeptide representing artificial human antibody CDR-L3 region
QQYNKWPPYT

SEQ ID NO: 16923 - protein, 9 aa, Artificial Sequence
  Synthetic polypeptide representing artificial human antibody CDR-L3 region
QQRSKWPLT

SEQ ID NO: 16924 - protein, 10 aa, Artificial Sequence
  Synthetic polypeptide representing artificial human antibody CDR-L3 region
ASYAGTNIAL

SEQ ID NO: 16925 - protein, 9 aa, Artificial Sequence
  Synthetic polypeptide representing artificial human antibody CDR-L3 region
HQSGTLPWT

SEQ ID NO: 16926 - protein, 12 aa, Artificial Sequence
  Synthetic polypeptide representing artificial human antibody CDR-L3 region
YSTDSSGNHRGV

SEQ ID NO: 16927 - protein, 9 aa, Artificial Sequence
  Synthetic polypeptide representing artificial human antibody CDR-L3 region
ETWDSNTRV

SEQ ID NO: 16928 - protein, 9 aa, Artificial Sequence
  Synthetic polypeptide representing artificial human antibody CDR-L3 region
HQYDDSEWT

SEQ ID NO: 16929 - protein, 10 aa, Artificial Sequence
  Synthetic polypeptide representing artificial human antibody CDR-L3 region
CLYVPYSLWL

SEQ ID NO: 16930 - protein, 9 aa, Artificial Sequence
  Synthetic polypeptide representing artificial human antibody CDR-L3 region
QQYNSYPWT

SEQ ID NO: 16931 - protein, 9 aa, Artificial Sequence
  Synthetic polypeptide representing artificial human antibody CDR-L3 region
QQRSDWPLT

SEQ ID NO: 16932 - protein, 9 aa, Artificial Sequence
  Synthetic polypeptide representing artificial human antibody CDR-L3 region
QQYYDWPLT

SEQ ID NO: 16933 - protein, 9 aa, Artificial Sequence
  Synthetic polypeptide representing artificial human antibody CDR-L3 region
MQTKQVPVT

SEQ ID NO: 16934 - protein, 9 aa, Artificial Sequence
  Synthetic polypeptide representing artificial human antibody CDR-L3 region
QQFDSYPLT

SEQ ID NO: 16935 - protein, 9 aa, Artificial Sequence
  Synthetic polypeptide representing artificial human antibody CDR-L3 region
QQYGSSPYT

SEQ ID NO: 16936 - protein, 11 aa, Artificial Sequence
  Synthetic polypeptide representing artificial human antibody CDR-L3 region
QHRSSWSPVFT

SEQ ID NO: 16937 - protein, 10 aa, Artificial Sequence
  Synthetic polypeptide representing artificial human antibody CDR-L3 region
QQYNNWPPIT

SEQ ID NO: 16938 - protein, 11 aa, Artificial Sequence
  Synthetic polypeptide representing artificial human antibody CDR-L3 region
QVWDSSIDHPL

SEQ ID NO: 16939 - protein, 10 aa, Artificial Sequence
  Synthetic polypeptide representing artificial human antibody CDR-L3 region
QQYKEWPPRT

SEQ ID NO: 16940 - protein, 9 aa, Artificial Sequence
  Synthetic polypeptide representing artificial human antibody CDR-L3 region
QYYGTPPRM

SEQ ID NO: 16941 - protein, 9 aa, Artificial Sequence
  Synthetic polypeptide representing artificial human antibody CDR-L3 region
QQAYSSRWT

SEQ ID NO: 16942 - protein, 11 aa, Artificial Sequence
  Synthetic polypeptide representing artificial human antibody CDR-L3 region
TGWDDGLGGPV

SEQ ID NO: 16943 - protein, 9 aa, Artificial Sequence
  Synthetic polypeptide representing artificial human antibody CDR-L3 region
QKYGSSMWT

SEQ ID NO: 16944 - protein, 9 aa, Artificial Sequence
  Synthetic polypeptide representing artificial human antibody CDR-L3 region
QQLNSYPPT

SEQ ID NO: 16945 - protein, 9 aa, Artificial Sequence
  Synthetic polypeptide representing artificial human antibody CDR-L3 region
QNYGTEPRM

SEQ ID NO: 16946 - protein, 9 aa, Artificial Sequence
  Synthetic polypeptide representing artificial human antibody CDR-L3 region
SSYTGNKIL

SEQ ID NO: 16947 - protein, 8 aa, Artificial Sequence
  Synthetic polypeptide representing artificial human antibody CDR-L3 region
QAWDSTVV

SEQ ID NO: 16948 - protein, 11 aa, Artificial Sequence
  Synthetic polypeptide representing artificial human antibody CDR-L3 region
QVWDGDSAHVI

SEQ ID NO: 16949 - protein, 11 aa, Artificial Sequence
  Synthetic polypeptide representing artificial human antibody CDR-L3 region
QSADSSGTYVL

SEQ ID NO: 16950 - protein, 9 aa, Artificial Sequence
  Synthetic polypeptide representing artificial human antibody CDR-L3 region
QQCYSFPYA

SEQ ID NO: 16951 - protein, 9 aa, Artificial Sequence
  Synthetic polypeptide representing artificial human antibody CDR-L3 region
RKYGTLPST

SEQ ID NO: 16952 - protein, 11 aa, Artificial Sequence
  Synthetic polypeptide representing artificial human antibody CDR-L3 region
AAWDDSLNGWL

SEQ ID NO: 16953 - protein, 10 aa, Artificial Sequence
  Synthetic polypeptide representing artificial human antibody CDR-L3 region
QQLNSYPPIT

SEQ ID NO: 16954 - protein, 9 aa, Artificial Sequence
  Synthetic polypeptide representing artificial human antibody CDR-L3 region
QQRSYWPRT

SEQ ID NO: 16955 - protein, 12 aa, Artificial Sequence
  Synthetic polypeptide representing artificial human antibody CDR-L3 region
QTYDNRLSASVV

SEQ ID NO: 16956 - protein, 10 aa, Artificial Sequence
  Synthetic polypeptide representing artificial human antibody CDR-L3 region
CSYAGSYLWV

SEQ ID NO: 16957 - protein, 8 aa, Artificial Sequence
  Synthetic polypeptide representing artificial human antibody CDR-L3 region
QQYYSLRT

SEQ ID NO: 16958 - protein, 5 aa, Artificial Sequence
  Synthetic polypeptide representing artificial human antibody CDR-L3 region
QFRGT

SEQ ID NO: 16959 - protein, 10 aa, Artificial Sequence
  Synthetic polypeptide representing artificial human antibody CDR-L3 region
QQYNNWPPLT

SEQ ID NO: 16960 - protein, 10 aa, Artificial Sequence
  Synthetic polypeptide representing artificial human antibody CDR-L3 region
QQLNSYPPLT

SEQ ID NO: 16961 - protein, 9 aa, Artificial Sequence
  Synthetic polypeptide representing artificial human antibody CDR-L3 region
QKYNSAPLT

SEQ ID NO: 16962 - protein, 9 aa, Artificial Sequence
  Synthetic polypeptide representing artificial human antibody CDR-L3 region
QELNSYPRT

SEQ ID NO: 16963 - protein, 9 aa, Artificial Sequence
  Synthetic polypeptide representing artificial human antibody CDR-L3 region
QKYNSALGT

SEQ ID NO: 16964 - protein, 10 aa, Artificial Sequence
  Synthetic polypeptide representing artificial human antibody CDR-L3 region
CSYAGSYSYV

SEQ ID NO: 16965 - protein, 8 aa, Artificial Sequence
  Synthetic polypeptide representing artificial human antibody CDR-L3 region
CSYTGTYY

SEQ ID NO: 16966 - protein, 11 aa, Artificial Sequence
  Synthetic polypeptide representing artificial human antibody CDR-L3 region
QSADSSGTYVV

SEQ ID NO: 16967 - protein, 9 aa, Artificial Sequence
  Synthetic polypeptide representing artificial human antibody CDR-L3 region
LQHNSYPLT

SEQ ID NO: 16968 - protein, 11 aa, Artificial Sequence
  Synthetic polypeptide representing artificial human antibody CDR-L3 region
QLWDSSGDQVV

SEQ ID NO: 16969 - protein, 9 aa, Artificial Sequence
  Synthetic polypeptide representing artificial human antibody CDR-L3 region
QQYGSSFGT

SEQ ID NO: 16970 - protein, 11 aa, Artificial Sequence
  Synthetic polypeptide representing artificial human antibody CDR-L3 region
GTWDSSLSAVV

SEQ ID NO: 16971 - protein, 9 aa, Artificial Sequence
  Synthetic polypeptide representing artificial human antibody CDR-L3 region
QQYLTAHPS

SEQ ID NO: 16972 - protein, 9 aa, Artificial Sequence
  Synthetic polypeptide representing artificial human antibody CDR-L3 region
QQSYSTSYT

SEQ ID NO: 16973 - protein, 9 aa, Artificial Sequence
  Synthetic polypeptide representing artificial human antibody CDR-L3 region
QKYNSAPYT

SEQ ID NO: 16974 - protein, 9 aa, Artificial Sequence
  Synthetic polypeptide representing artificial human antibody CDR-L3 region
NQYNNWPLT

SEQ ID NO: 16975 - protein, 10 aa, Artificial Sequence
  Synthetic polypeptide representing artificial human antibody CDR-L3 region
QQLNSYPPYT

SEQ ID NO: 16976 - protein, 9 aa, Artificial Sequence
  Synthetic polypeptide representing artificial human antibody CDR-L3 region
QYLSDSPRT

SEQ ID NO: 16977 - protein, 9 aa, Artificial Sequence
  Synthetic polypeptide representing artificial human antibody CDR-L3 region
QQYGSSPGT

SEQ ID NO: 16978 - protein, 9 aa, Artificial Sequence
  Synthetic polypeptide representing artificial human antibody CDR-L3 region
MQSIQLPLT

SEQ ID NO: 16979 - protein, 11 aa, Artificial Sequence
  Synthetic polypeptide representing artificial human antibody CDR-L3 region
QSADSSGTSLV

SEQ ID NO: 16980 - protein, 8 aa, Artificial Sequence
  Synthetic polypeptide representing artificial human antibody CDR-L3 region
QAWDSSTV

SEQ ID NO: 16981 - protein, 9 aa, Artificial Sequence
  Synthetic polypeptide representing artificial human antibody CDR-L3 region
QQSYSTPKT

SEQ ID NO: 16982 - protein, 12 aa, Artificial Sequence
  Synthetic polypeptide representing artificial human antibody CDR-L3 region
NSRDNSGNHPRI

SEQ ID NO: 16983 - protein, 10 aa, Artificial Sequence
  Synthetic polypeptide representing artificial human antibody CDR-L3 region
CSYAGSSTYV

SEQ ID NO: 16984 - protein, 9 aa, Artificial Sequence
  Synthetic polypeptide representing artificial human antibody CDR-L3 region
QQRSNWPLT

SEQ ID NO: 16985 - protein, 9 aa, Artificial Sequence
  Synthetic polypeptide representing artificial human antibody CDR-L3 region
QQYYTNPFT

SEQ ID NO: 16986 - protein, 14 aa, Artificial Sequence
  Synthetic polypeptide representing artificial human antibody CDR-L3 region
GADHGSGSNFVYVV

SEQ ID NO: 16987 - protein, 12 aa, Artificial Sequence
  Synthetic polypeptide representing artificial human antibody CDR-L3 region
YSTDSKGYHQGI

SEQ ID NO: 16988 - protein, 11 aa, Artificial Sequence
  Synthetic polypeptide representing artificial human antibody CDR-L3 region
QSADSSGTSVV

SEQ ID NO: 16989 - protein, 9 aa, Artificial Sequence
  Synthetic polypeptide representing artificial human antibody CDR-L3 region
QAWDSSTVV

SEQ ID NO: 16990 - protein, 9 aa, Artificial Sequence
  Synthetic polypeptide representing artificial human antibody CDR-L3 region
CSYAGSLVV

SEQ ID NO: 16991 - protein, 10 aa, Artificial Sequence
  Synthetic polypeptide representing artificial human antibody CDR-L3 region
SSYAGNRKGV

SEQ ID NO: 16992 - protein, 12 aa, Artificial Sequence
  Synthetic polypeptide representing artificial human antibody CDR-L3 region
QSYDSSLSGLYV

SEQ ID NO: 16993 - protein, 9 aa, Artificial Sequence
  Synthetic polypeptide representing artificial human antibody CDR-L3 region
QQYDKWPLT

SEQ ID NO: 16994 - protein, 10 aa, Artificial Sequence
  Synthetic polypeptide representing artificial human antibody CDR-L3 region
QQSYSTPPYT

SEQ ID NO: 16995 - protein, 10 aa, Artificial Sequence
  Synthetic polypeptide representing artificial human antibody CDR-L3 region
QAWDSSTFVV

SEQ ID NO: 16996 - protein, 11 aa, Artificial Sequence
  Synthetic polypeptide representing artificial human antibody CDR-L3 region
AAWDDSLSAWV

SEQ ID NO: 16997 - protein, 11 aa, Artificial Sequence
  Synthetic polypeptide representing artificial human antibody CDR-L3 region
MQSIQLPLIYT

SEQ ID NO: 16998 - protein, 8 aa, Artificial Sequence
  Synthetic polypeptide representing artificial human antibody CDR-L3 region
QQYKSNYN

SEQ ID NO: 16999 - protein, 9 aa, Artificial Sequence
  Synthetic polypeptide representing artificial human antibody CDR-L3 region
QAWDSSTGV

SEQ ID NO: 17000 - protein, 13 aa, Artificial Sequence
  Synthetic polypeptide representing artificial human antibody CDR-L3 region
GADHGSGSNFVYV

SEQ ID NO: 17001 - protein, 12 aa, Artificial Sequence
  Synthetic polypeptide representing artificial human antibody CDR-L3 region
QSYDSSLSGSGV

SEQ ID NO: 17002 - protein, 9 aa, Artificial Sequence
  Synthetic polypeptide representing artificial human antibody CDR-L3 region
QQYNSYSRT

SEQ ID NO: 17003 - protein, 9 aa, Artificial Sequence
  Synthetic polypeptide representing artificial human antibody CDR-L3 region
QQRSKWPLT

SEQ ID NO: 17004 - protein, 9 aa, Artificial Sequence
  Synthetic polypeptide representing artificial human antibody CDR-L3 region
QQLNSYPLT

SEQ ID NO: 17005 - protein, 11 aa, Artificial Sequence
  Synthetic polypeptide representing artificial human antibody CDR-L3 region
QQYNNWPPIWT

SEQ ID NO: 17006 - protein, 9 aa, Artificial Sequence
  Synthetic polypeptide representing artificial human antibody CDR-L3 region
QQRSNWPIT

SEQ ID NO: 17007 - protein, 9 aa, Artificial Sequence
  Synthetic polypeptide representing artificial human antibody CDR-L3 region
QQYNSYPVT

SEQ ID NO: 17008 - protein, 9 aa, Artificial Sequence
  Synthetic polypeptide representing artificial human antibody CDR-L3 region
QAWDSSTVV

SEQ ID NO: 17009 - protein, 9 aa, Artificial Sequence
  Synthetic polypeptide representing artificial human antibody CDR-L3 region
QSADSSGIV

SEQ ID NO: 17010 - protein, 9 aa, Artificial Sequence
  Synthetic polypeptide representing artificial human antibody CDR-L3 region
QQANSFPLT

SEQ ID NO: 17011 - protein, 5 aa, Artificial Sequence
  Synthetic polypeptide representing artificial human antibody CDR-L3 region
QQLNT

SEQ ID NO: 17012 - protein, 11 aa, Artificial Sequence
  Synthetic polypeptide representing artificial human antibody CDR-L3 region
CSYAGSSTFVV

SEQ ID NO: 17013 - protein, 11 aa, Artificial Sequence
  Synthetic polypeptide representing artificial human antibody CDR-L3 region
SSFAGIPKHYV

SEQ ID NO: 17014 - protein, 10 aa, Artificial Sequence
  Synthetic polypeptide representing artificial human antibody CDR-L3 region
QSADSSGTYV

SEQ ID NO: 17015 - protein, 12 aa, Artificial Sequence
  Synthetic polypeptide representing artificial human antibody CDR-L3 region
CSYAGSSTSYVV

SEQ ID NO: 17016 - protein, 11 aa, Artificial Sequence
  Synthetic polypeptide representing artificial human antibody CDR-L3 region
SSYTSSSTLVV

SEQ ID NO: 17017 - protein, 12 aa, Artificial Sequence
  Synthetic polypeptide representing artificial human antibody CDR-L3 region
QSADNIGSFLVV

SEQ ID NO: 17018 - protein, 11 aa, Artificial Sequence
  Synthetic polypeptide representing artificial human antibody CDR-L3 region
QSADSSGTYWV

SEQ ID NO: 17019 - protein, 10 aa, Artificial Sequence
  Synthetic polypeptide representing artificial human antibody CDR-L3 region
QQSYSTPLYT

SEQ ID NO: 17020 - protein, 13 aa, Artificial Sequence
  Synthetic polypeptide representing artificial human antibody CDR-L3 region
GADHGSGSNFAVV

SEQ ID NO: 17021 - protein, 9 aa, Artificial Sequence
  Synthetic polypeptide representing artificial human antibody CDR-L3 region
QQYGRSPPT

SEQ ID NO: 17022 - protein, 9 aa, Artificial Sequence
  Synthetic polypeptide representing artificial human antibody CDR-L3 region
MQGTHWPLT

SEQ ID NO: 17023 - protein, 11 aa, Artificial Sequence
  Synthetic polypeptide representing artificial human antibody CDR-L3 region
LLYHSAFVVIG

SEQ ID NO: 17024 - protein, 11 aa, Artificial Sequence
  Synthetic polypeptide representing artificial human antibody CDR-L3 region
YSRDTSGNLRV

SEQ ID NO: 17025 - protein, 9 aa, Artificial Sequence
  Synthetic polypeptide representing artificial human antibody CDR-L3 region
QQYYSTPPT

SEQ ID NO: 17026 - protein, 11 aa, Artificial Sequence
  Synthetic polypeptide representing artificial human antibody CDR-L3 region
SSFAGTDYHYV

SEQ ID NO: 17027 - protein, 9 aa, Artificial Sequence
  Synthetic polypeptide representing artificial human antibody CDR-L3 region
QQYYSTTVT

SEQ ID NO: 17028 - protein, 9 aa, Artificial Sequence
  Synthetic polypeptide representing artificial human antibody CDR-L3 region
QQYYSYPWT

SEQ ID NO: 17029 - protein, 8 aa, Artificial Sequence
  Synthetic polypeptide representing artificial human antibody CDR-L3 region
CSYAGSWV

SEQ ID NO: 17030 - protein, 9 aa, Artificial Sequence
  Synthetic polypeptide representing artificial human antibody CDR-L3 region
QSADSSGYV

SEQ ID NO: 17031 - protein, 11 aa, Artificial Sequence
  Synthetic polypeptide representing artificial human antibody CDR-L3 region
AAWDDRLLGPL

SEQ ID NO: 17032 - protein, 12 aa, Artificial Sequence
  Synthetic polypeptide representing artificial human antibody CDR-L3 region
QSYDGSLSGSGV

SEQ ID NO: 17033 - protein, 12 aa, Artificial Sequence
  Synthetic polypeptide representing artificial human antibody CDR-L3 region
QSADSSGTFLVV

SEQ ID NO: 17034 - protein, 10 aa, Artificial Sequence
  Synthetic polypeptide representing artificial human antibody CDR-L3 region
QQRSNWPPWT

SEQ ID NO: 17035 - protein, 9 aa, Artificial Sequence
  Synthetic polypeptide representing artificial human antibody CDR-L3 region
HQTHSTPRT

SEQ ID NO: 17036 - protein, 9 aa, Artificial Sequence
  Synthetic polypeptide representing artificial human antibody CDR-L3 region
LQHNSYPLT

SEQ ID NO: 17037 - protein, 10 aa, Artificial Sequence
  Synthetic polypeptide representing artificial human antibody CDR-L3 region
MQGTDWPVYT

SEQ ID NO: 17038 - protein, 12 aa, Artificial Sequence
  Synthetic polypeptide representing artificial human antibody CDR-L3 region
AAWDDSLSGSYV

SEQ ID NO: 17039 - protein, 10 aa, Artificial Sequence
  Synthetic polypeptide representing artificial human antibody CDR-L3 region
QSYDSSNHVV

SEQ ID NO: 17040 - protein, 9 aa, Artificial Sequence
  Synthetic polypeptide representing artificial human antibody CDR-L3 region
QQTYNSPWT

SEQ ID NO: 17041 - protein, 11 aa, Artificial Sequence
  Synthetic polypeptide representing artificial human antibody CDR-L3 region
GTWDSSLSAVV

SEQ ID NO: 17042 - protein, 9 aa, Artificial Sequence
  Synthetic polypeptide representing artificial human antibody CDR-L3 region
QAWDSSTAV

SEQ ID NO: 17043 - protein, 10 aa, Artificial Sequence
  Synthetic polypeptide representing artificial human antibody CDR-L3 region
AAWDDSLSVL

SEQ ID NO: 17044 - protein, 11 aa, Artificial Sequence
  Synthetic polypeptide representing artificial human antibody CDR-L3 region
AAWDDSLNGWV

SEQ ID NO: 17045 - protein, 9 aa, Artificial Sequence
  Synthetic polypeptide representing artificial human antibody CDR-L3 region
QQFLSPPYT

SEQ ID NO: 17046 - protein, 13 aa, Artificial Sequence
  Synthetic polypeptide representing artificial human antibody CDR-L3 region
GADHGSGSNFVYV

SEQ ID NO: 17047 - protein, 11 aa, Artificial Sequence
  Synthetic polypeptide representing artificial human antibody CDR-L3 region
AAWDDSLSGWV

SEQ ID NO: 17048 - protein, 12 aa, Artificial Sequence
  Synthetic polypeptide representing artificial human antibody CDR-L3 region
QSAESSGSYLVV

SEQ ID NO: 17049 - protein, 9 aa, Artificial Sequence
  Synthetic polypeptide representing artificial human antibody CDR-L3 region
QQSYSPPWT

SEQ ID NO: 17050 - protein, 11 aa, Artificial Sequence
  Synthetic polypeptide representing artificial human antibody CDR-L3 region
AAWDDSLNGPV

SEQ ID NO: 17051 - protein, 9 aa, Artificial Sequence
  Synthetic polypeptide representing artificial human antibody CDR-L3 region
QQSYSTPFT

SEQ ID NO: 17052 - protein, 11 aa, Artificial Sequence
  Synthetic polypeptide representing artificial human antibody CDR-L3 region
YSTDSSGNHWV

SEQ ID NO: 17053 - protein, 12 aa, Artificial Sequence
  Synthetic polypeptide representing artificial human antibody CDR-L3 region
QSADNIGTFLVL

SEQ ID NO: 17054 - protein, 12 aa, Artificial Sequence
  Synthetic polypeptide representing artificial human antibody CDR-L3 region
QSYDSSLIGSVI

SEQ ID NO: 17055 - protein, 11 aa, Artificial Sequence
  Synthetic polypeptide representing artificial human antibody CDR-L3 region
QSADSSGTYVV

SEQ ID NO: 17056 - protein, 9 aa, Artificial Sequence
  Synthetic polypeptide representing artificial human antibody CDR-L3 region
QQYYNTPYS

SEQ ID NO: 17057 - protein, 11 aa, Artificial Sequence
  Synthetic polypeptide representing artificial human antibody CDR-L3 region
HSRAKSGYHYV

SEQ ID NO: 17058 - protein, 11 aa, Artificial Sequence
  Synthetic polypeptide representing artificial human antibody CDR-L3 region
GTWDSSLSAGV

SEQ ID NO: 17059 - protein, 8 aa, Artificial Sequence
  Synthetic polypeptide representing artificial human antibody CDR-L3 region
QAWDSSTV

SEQ ID NO: 17060 - protein, 12 aa, Artificial Sequence
  Synthetic polypeptide representing artificial human antibody CDR-L3 region
QSADNIGTFLVV

SEQ ID NO: 17061 - protein, 11 aa, Artificial Sequence
  Synthetic polypeptide representing artificial human antibody CDR-L3 region
QQYTKWPPGLT

SEQ ID NO: 17062 - protein, 9 aa, Artificial Sequence
  Synthetic polypeptide representing artificial human antibody CDR-L3 region
QAWDSSLYV

SEQ ID NO: 17063 - protein, 9 aa, Artificial Sequence
  Synthetic polypeptide representing artificial human antibody CDR-L3 region
QAWDSSTAV

SEQ ID NO: 17064 - protein, 9 aa, Artificial Sequence
  Synthetic polypeptide representing artificial human antibody CDR-L3 region
QQYGSSLVT

SEQ ID NO: 17065 - protein, 11 aa, Artificial Sequence
  Synthetic polypeptide representing artificial human antibody CDR-L3 region
QSADSSGTYVV

SEQ ID NO: 17066 - protein, 9 aa, Artificial Sequence
  Synthetic polypeptide representing artificial human antibody CDR-L3 region
QQYYNTPYT

SEQ ID NO: 17067 - protein, 8 aa, Artificial Sequence
  Synthetic polypeptide representing artificial human antibody CDR-L3 region
MQGIHLWT

SEQ ID NO: 17068 - protein, 11 aa, Artificial Sequence
  Synthetic polypeptide representing artificial human antibody CDR-L3 region
QLYAEWPPKHT

SEQ ID NO: 17069 - protein, 11 aa, Artificial Sequence
  Synthetic polypeptide representing artificial human antibody CDR-L3 region
QSADSSGTSLV

SEQ ID NO: 17070 - protein, 12 aa, Artificial Sequence
  Synthetic polypeptide representing artificial human antibody CDR-L3 region
QSADSSGTSDVV

SEQ ID NO: 17071 - protein, 10 aa, Artificial Sequence
  Synthetic polypeptide representing artificial human antibody CDR-L3 region
SSSIGNYNYV

SEQ ID NO: 17072 - protein, 10 aa, Artificial Sequence
  Synthetic polypeptide representing artificial human antibody CDR-L3 region
QVWDSSSPVV

SEQ ID NO: 17073 - protein, 9 aa, Artificial Sequence
  Synthetic polypeptide representing artificial human antibody CDR-L3 region
MQVTDFPWT

SEQ ID NO: 17074 - protein, 9 aa, Artificial Sequence
  Synthetic polypeptide representing artificial human antibody CDR-L3 region
MIWHNMALV

SEQ ID NO: 17075 - protein, 11 aa, Artificial Sequence
  Synthetic polypeptide representing artificial human antibody CDR-L3 region
SAWDSSLTARV

SEQ ID NO: 17076 - protein, 9 aa, Artificial Sequence
  Synthetic polypeptide representing artificial human antibody CDR-L3 region
QQYGDSQLT

SEQ ID NO: 17077 - protein, 9 aa, Artificial Sequence
  Synthetic polypeptide representing artificial human antibody CDR-L3 region
QQADSFPVT

SEQ ID NO: 17078 - protein, 11 aa, Artificial Sequence
  Synthetic polypeptide representing artificial human antibody CDR-L3 region
GTWDTSLSAWV

SEQ ID NO: 17079 - protein, 11 aa, Artificial Sequence
  Synthetic polypeptide representing artificial human antibody CDR-L3 region
HSRDSSGHLSL

SEQ ID NO: 17080 - protein, 9 aa, Artificial Sequence
  Synthetic polypeptide representing artificial human antibody CDR-L3 region
QHYHKWPIT

SEQ ID NO: 17081 - protein, 9 aa, Artificial Sequence
  Synthetic polypeptide representing artificial human antibody CDR-L3 region
MIWDNNAAV

SEQ ID NO: 17082 - protein, 9 aa, Artificial Sequence
  Synthetic polypeptide representing artificial human antibody CDR-L3 region
MQATHFPLS

SEQ ID NO: 17083 - protein, 12 aa, Artificial Sequence
  Synthetic polypeptide representing artificial human antibody CDR-L3 region
GTWDSSLSAGGL

SEQ ID NO: 17084 - protein, 10 aa, Artificial Sequence
  Synthetic polypeptide representing artificial human antibody CDR-L3 region
SSYAGSNNWV

SEQ ID NO: 17085 - protein, 12 aa, Artificial Sequence
  Synthetic polypeptide representing artificial human antibody CDR-L3 region
QQYNNWPPARIT

SEQ ID NO: 17086 - protein, 10 aa, Artificial Sequence
  Synthetic polypeptide representing artificial human antibody CDR-L3 region
VLYRGRGAVV

SEQ ID NO: 17087 - protein, 11 aa, Artificial Sequence
  Synthetic polypeptide representing artificial human antibody CDR-L3 region
AAWDDSLNGYV

SEQ ID NO: 17088 - protein, 9 aa, Artificial Sequence
  Synthetic polypeptide representing artificial human antibody CDR-L3 region
QQRAKWPPT

SEQ ID NO: 17089 - protein, 9 aa, Artificial Sequence
  Synthetic polypeptide representing artificial human antibody CDR-L3 region
QQLNSYPFT

SEQ ID NO: 17090 - protein, 10 aa, Artificial Sequence
  Synthetic polypeptide representing artificial human antibody CDR-L3 region
QVWDSGNERV

SEQ ID NO: 17091 - protein, 9 aa, Artificial Sequence
  Synthetic polypeptide representing artificial human antibody CDR-L3 region
QHYIEWPIT

SEQ ID NO: 17092 - protein, 10 aa, Artificial Sequence
  Synthetic polypeptide representing artificial human antibody CDR-L3 region
QQYKNWPTWT

SEQ ID NO: 17093 - protein, 9 aa, Artificial Sequence
  Synthetic polypeptide representing artificial human antibody CDR-L3 region
QQRSKWPIT

SEQ ID NO: 17094 - protein, 9 aa, Artificial Sequence
  Synthetic polypeptide representing artificial human antibody CDR-L3 region
QQSYSTPHT

SEQ ID NO: 17095 - protein, 8 aa, Artificial Sequence
  Synthetic polypeptide representing artificial human antibody CDR-L3 region
QQYYSYRG

SEQ ID NO: 17096 - protein, 11 aa, Artificial Sequence
  Synthetic polypeptide representing artificial human antibody CDR-L3 region
SAWDSSLSAQV

SEQ ID NO: 17097 - protein, 9 aa, Artificial Sequence
  Synthetic polypeptide representing artificial human antibody CDR-L3 region
QKYNSVPLT

SEQ ID NO: 17098 - protein, 9 aa, Artificial Sequence
  Synthetic polypeptide representing artificial human antibody CDR-L3 region
SSYTSSSTV

SEQ ID NO: 17099 - protein, 9 aa, Artificial Sequence
  Synthetic polypeptide representing artificial human antibody CDR-L3 region
QQNDNVPIT

SEQ ID NO: 17100 - protein, 12 aa, Artificial Sequence
  Synthetic polypeptide representing artificial human antibody CDR-L3 region
GTWDSGLSGGAL

SEQ ID NO: 17101 - protein, 9 aa, Artificial Sequence
  Synthetic polypeptide representing artificial human antibody CDR-L3 region
QQYFKWPIT

SEQ ID NO: 17102 - protein, 10 aa, Artificial Sequence
  Synthetic polypeptide representing artificial human antibody CDR-L3 region
CSYARGEKWV

SEQ ID NO: 17103 - protein, 13 aa, Artificial Sequence
  Synthetic polypeptide representing artificial human antibody CDR-L3 region
CSRDSSGNHLRVI

SEQ ID NO: 17104 - protein, 9 aa, Artificial Sequence
  Synthetic polypeptide representing artificial human antibody CDR-L3 region
QQRTNWPLT

SEQ ID NO: 17105 - protein, 10 aa, Artificial Sequence
  Synthetic polypeptide representing artificial human antibody CDR-L3 region
ASYTTRLFVV

SEQ ID NO: 17106 - protein, 10 aa, Artificial Sequence
  Synthetic polypeptide representing artificial human antibody CDR-L3 region
QQYKNWPPRT

SEQ ID NO: 17107 - protein, 9 aa, Artificial Sequence
  Synthetic polypeptide representing artificial human antibody CDR-L3 region
CSYISTNTL

SEQ ID NO: 17108 - protein, 12 aa, Artificial Sequence
  Synthetic polypeptide representing artificial human antibody CDR-L3 region
NSRDTSGDHLWM

SEQ ID NO: 17109 - protein, 10 aa, Artificial Sequence
  Synthetic polypeptide representing artificial human antibody CDR-L3 region
QSADNNGFVA

SEQ ID NO: 17110 - protein, 10 aa, Artificial Sequence
  Synthetic polypeptide representing artificial human antibody CDR-L3 region
QHYGSSPPYS

SEQ ID NO: 17111 - protein, 9 aa, Artificial Sequence
  Synthetic polypeptide representing artificial human antibody CDR-L3 region
QHYYDTPLS

SEQ ID NO: 17112 - protein, 9 aa, Artificial Sequence
  Synthetic polypeptide representing artificial human antibody CDR-L3 region
QQSYSTAIT

SEQ ID NO: 17113 - protein, 10 aa, Artificial Sequence
  Synthetic polypeptide representing artificial human antibody CDR-L3 region
MSYTTSNSYV

SEQ ID NO: 17114 - protein, 9 aa, Artificial Sequence
  Synthetic polypeptide representing artificial human antibody CDR-L3 region
LDYNSYPLT

SEQ ID NO: 17115 - protein, 9 aa, Artificial Sequence
  Synthetic polypeptide representing artificial human antibody CDR-L3 region
MQALRSPIT

SEQ ID NO: 17116 - protein, 9 aa, Artificial Sequence
  Synthetic polypeptide representing artificial human antibody CDR-L3 region
QSHDAASVV

SEQ ID NO: 17117 - protein, 9 aa, Artificial Sequence
  Synthetic polypeptide representing artificial human antibody CDR-L3 region
MQPLHTPWT

SEQ ID NO: 17118 - protein, 9 aa, Artificial Sequence
  Synthetic polypeptide representing artificial human antibody CDR-L3 region
QHYNNWPPA

SEQ ID NO: 17119 - protein, 11 aa, Artificial Sequence
  Synthetic polypeptide representing artificial human antibody CDR-L3 region
SSYTSSSTLWV

SEQ ID NO: 17120 - protein, 11 aa, Artificial Sequence
  Synthetic polypeptide representing artificial human antibody CDR-L3 region
AAWDDTLIGYV

SEQ ID NO: 17121 - protein, 9 aa, Artificial Sequence
  Synthetic polypeptide representing artificial human antibody CDR-L3 region
QSYDRGKMV

SEQ ID NO: 17122 - protein, 10 aa, Artificial Sequence
  Synthetic polypeptide representing artificial human antibody CDR-L3 region
QQYMNWPPRT

SEQ ID NO: 17123 - protein, 10 aa, Artificial Sequence
  Synthetic polypeptide representing artificial human antibody CDR-L3 region
CSYAGNNRFV

SEQ ID NO: 17124 - protein, 11 aa, Artificial Sequence
  Synthetic polypeptide representing artificial human antibody CDR-L3 region
CSYTDSSPSVV

SEQ ID NO: 17125 - protein, 10 aa, Artificial Sequence
  Synthetic polypeptide representing artificial human antibody CDR-L3 region
QLYDNVVPVT

SEQ ID NO: 17126 - protein, 9 aa, Artificial Sequence
  Synthetic polypeptide representing artificial human antibody CDR-L3 region
QKYNSAPLT

SEQ ID NO: 17127 - protein, 9 aa, Artificial Sequence
  Synthetic polypeptide representing artificial human antibody CDR-L3 region
QQYNSYSGS

SEQ ID NO: 17128 - protein, 10 aa, Artificial Sequence
  Synthetic polypeptide representing artificial human antibody CDR-L3 region
CSYVGDFYVI

SEQ ID NO: 17129 - protein, 9 aa, Artificial Sequence
  Synthetic polypeptide representing artificial human antibody CDR-L3 region
QQSYTTPIT

SEQ ID NO: 17130 - protein, 9 aa, Artificial Sequence
  Synthetic polypeptide representing artificial human antibody CDR-L3 region
QLYYGGALV

SEQ ID NO: 17131 - protein, 9 aa, Artificial Sequence
  Synthetic polypeptide representing artificial human antibody CDR-L3 region
QQLNSYSLT

SEQ ID NO: 17132 - protein, 11 aa, Artificial Sequence
  Synthetic polypeptide representing artificial human antibody CDR-L3 region
SCRDGNGNHVP

SEQ ID NO: 17133 - protein, 9 aa, Artificial Sequence
  Synthetic polypeptide representing artificial human antibody CDR-L3 region
QQYGSSPLT

SEQ ID NO: 17134 - protein, 10 aa, Artificial Sequence
  Synthetic polypeptide representing artificial human antibody CDR-L3 region
QQYSNWPPRT

SEQ ID NO: 17135 - protein, 9 aa, Artificial Sequence
  Synthetic polypeptide representing artificial human antibody CDR-L3 region
QQSYSSPYN

SEQ ID NO: 17136 - protein, 11 aa, Artificial Sequence
  Synthetic polypeptide representing artificial human antibody CDR-L3 region
AAWDDSLNGVL

SEQ ID NO: 17137 - protein, 12 aa, Artificial Sequence
  Synthetic polypeptide representing artificial human antibody CDR-L3 region
QVWDTNTDHLEV

SEQ ID NO: 17138 - protein, 9 aa, Artificial Sequence
  Synthetic polypeptide representing artificial human antibody CDR-L3 region
QKYNSAPWT

SEQ ID NO: 17139 - protein, 11 aa, Artificial Sequence
  Synthetic polypeptide representing artificial human antibody CDR-L3 region
AVWDDTLRAVI

SEQ ID NO: 17140 - protein, 11 aa, Artificial Sequence
  Synthetic polypeptide representing artificial human antibody CDR-L3 region
SAWDSSLNVRV

SEQ ID NO: 17141 - protein, 11 aa, Artificial Sequence
  Synthetic polypeptide representing artificial human antibody CDR-L3 region
SSFTSDSTHLI

SEQ ID NO: 17142 - protein, 9 aa, Artificial Sequence
  Synthetic polypeptide representing artificial human antibody CDR-L3 region
QQYYSHPYT

SEQ ID NO: 17143 - protein, 9 aa, Artificial Sequence
  Synthetic polypeptide representing artificial human antibody CDR-L3 region
LQSTQFPRT

SEQ ID NO: 17144 - protein, 9 aa, Artificial Sequence
  Synthetic polypeptide representing artificial human antibody CDR-L3 region
QSYDRGVMV

SEQ ID NO: 17145 - protein, 10 aa, Artificial Sequence
  Synthetic polypeptide representing artificial human antibody CDR-L3 region
QSYDSSNQII

SEQ ID NO: 17146 - protein, 9 aa, Artificial Sequence
  Synthetic polypeptide representing artificial human antibody CDR-L3 region
QHYYEWPIT

SEQ ID NO: 17147 - protein, 9 aa, Artificial Sequence
  Synthetic polypeptide representing artificial human antibody CDR-L3 region
QQYGSSPWT

SEQ ID NO: 17148 - protein, 11 aa, Artificial Sequence
  Synthetic polypeptide representing artificial human antibody CDR-L3 region
QSYDSSLSGWV

SEQ ID NO: 17149 - protein, 13 aa, Artificial Sequence
  Synthetic polypeptide representing artificial human antibody CDR-L3 region
SSYTRRSNTVTVV

SEQ ID NO: 17150 - protein, 11 aa, Artificial Sequence
  Synthetic polypeptide representing artificial human antibody CDR-L3 region
AAWDDSLSGVV

SEQ ID NO: 17151 - protein, 9 aa, Artificial Sequence
  Synthetic polypeptide representing artificial human antibody CDR-L3 region
MQATQFPWT

SEQ ID NO: 17152 - protein, 9 aa, Artificial Sequence
  Synthetic polypeptide representing artificial human antibody CDR-L3 region
QQYETYSWT

SEQ ID NO: 17153 - protein, 11 aa, Artificial Sequence
  Synthetic polypeptide representing artificial human antibody CDR-L3 region
ATWDRSLSAWV

SEQ ID NO: 17154 - protein, 10 aa, Artificial Sequence
  Synthetic polypeptide representing artificial human antibody CDR-L3 region
QQYNNWPPIT

SEQ ID NO: 17155 - protein, 11 aa, Artificial Sequence
  Synthetic polypeptide representing artificial human antibody CDR-L3 region
AVWDDSLNGPV

SEQ ID NO: 17156 - protein, 10 aa, Artificial Sequence
  Synthetic polypeptide representing artificial human antibody CDR-L3 region
QQYDRTPPVT

SEQ ID NO: 17157 - protein, 9 aa, Artificial Sequence
  Synthetic polypeptide representing artificial human antibody CDR-L3 region
QHYSAYPPT

SEQ ID NO: 17158 - protein, 9 aa, Artificial Sequence
  Synthetic polypeptide representing artificial human antibody CDR-L3 region
MQALQIPYT

SEQ ID NO: 17159 - protein, 12 aa, Artificial Sequence
  Synthetic polypeptide representing artificial human antibody CDR-L3 region
AAWDDRLRGSWV

SEQ ID NO: 17160 - protein, 11 aa, Artificial Sequence
  Synthetic polypeptide representing artificial human antibody CDR-L3 region
ATWDDSLKGPV

SEQ ID NO: 17161 - protein, 9 aa, Artificial Sequence
  Synthetic polypeptide representing artificial human antibody CDR-L3 region
QTWGTGSWV

SEQ ID NO: 17162 - protein, 10 aa, Artificial Sequence
  Synthetic polypeptide representing artificial human antibody CDR-L3 region
QQYRMWPPLT

SEQ ID NO: 17163 - protein, 11 aa, Artificial Sequence
  Synthetic polypeptide representing artificial human antibody CDR-L3 region
ATWDDSLNGPV

SEQ ID NO: 17164 - protein, 10 aa, Artificial Sequence
  Synthetic polypeptide representing artificial human antibody CDR-L3 region
QQYGSSFAYT

SEQ ID NO: 17165 - protein, 11 aa, Artificial Sequence
  Synthetic polypeptide representing artificial human antibody CDR-L3 region
GTWDNSLSAGV

SEQ ID NO: 17166 - protein, 11 aa, Artificial Sequence
  Synthetic polypeptide representing artificial human antibody CDR-L3 region
GAWDSDLAIYV

SEQ ID NO: 17167 - protein, 11 aa, Artificial Sequence
  Synthetic polypeptide representing artificial human antibody CDR-L3 region
AVWDDSLNGPV

SEQ ID NO: 17168 - protein, 11 aa, Artificial Sequence
  Synthetic polypeptide representing artificial human antibody CDR-L3 region
SAWDYSLNGRL

SEQ ID NO: 17169 - protein, 9 aa, Artificial Sequence
  Synthetic polypeptide representing artificial human antibody CDR-L3 region
MQALQTARS

SEQ ID NO: 17170 - protein, 11 aa, Artificial Sequence
  Synthetic polypeptide representing artificial human antibody CDR-L3 region
ATWDDSLKGPV

SEQ ID NO: 17171 - protein, 11 aa, Artificial Sequence
  Synthetic polypeptide representing artificial human antibody CDR-L3 region
ATWDDSLKGPV

SEQ ID NO: 17172 - protein, 9 aa, Artificial Sequence
  Synthetic polypeptide representing artificial human antibody CDR-L3 region
QSYDNNLWV

SEQ ID NO: 17173 - protein, 9 aa, Artificial Sequence
  Synthetic polypeptide representing artificial human antibody CDR-L3 region
MQATEFPRT

SEQ ID NO: 17174 - protein, 9 aa, Artificial Sequence
  Synthetic polypeptide representing artificial human antibody CDR-L3 region
QHYDSLPLT

SEQ ID NO: 17175 - protein, 11 aa, Artificial Sequence
  Synthetic polypeptide representing artificial human antibody CDR-L3 region
QQVTSYRQGCT

SEQ ID NO: 17176 - protein, 9 aa, Artificial Sequence
  Synthetic polypeptide representing artificial human antibody CDR-L3 region
QHYDGYSIT

SEQ ID NO: 17177 - protein, 11 aa, Artificial Sequence
  Synthetic polypeptide representing artificial human antibody CDR-L3 region
YSTDSSGNHWV

SEQ ID NO: 17178 - protein, 10 aa, Artificial Sequence
  Synthetic polypeptide representing artificial human antibody CDR-L3 region
CSYAGTYTWV

SEQ ID NO: 17179 - protein, 11 aa, Artificial Sequence
  Synthetic polypeptide representing artificial human antibody CDR-L3 region
GTWDGSLSAVV

SEQ ID NO: 17180 - protein, 9 aa, Artificial Sequence
  Synthetic polypeptide representing artificial human antibody CDR-L3 region
QQYASYPLT

SEQ ID NO: 17181 - protein, 9 aa, Artificial Sequence
  Synthetic polypeptide representing artificial human antibody CDR-L3 region
QQLNRYPLT

SEQ ID NO: 17182 - protein, 11 aa, Artificial Sequence
  Synthetic polypeptide representing artificial human antibody CDR-L3 region
ATWDDSLKGPV

SEQ ID NO: 17183 - protein, 11 aa, Artificial Sequence
  Synthetic polypeptide representing artificial human antibody CDR-L3 region
ATWDDSVKGPV

SEQ ID NO: 17184 - protein, 9 aa, Artificial Sequence
  Synthetic polypeptide representing artificial human antibody CDR-L3 region
LQATKFPLT

SEQ ID NO: 17185 - protein, 9 aa, Artificial Sequence
  Synthetic polypeptide representing artificial human antibody CDR-L3 region
LATNNLPYT

SEQ ID NO: 17186 - protein, 11 aa, Artificial Sequence
  Synthetic polypeptide representing artificial human antibody CDR-L3 region
SSYTGSNTFAV

SEQ ID NO: 17187 - protein, 11 aa, Artificial Sequence
  Synthetic polypeptide representing artificial human antibody CDR-L3 region
SSYAGSNNLGV

SEQ ID NO: 17188 - protein, 9 aa, Artificial Sequence
  Synthetic polypeptide representing artificial human antibody CDR-L3 region
QHYDTYPPS

SEQ ID NO: 17189 - protein, 9 aa, Artificial Sequence
  Synthetic polypeptide representing artificial human antibody CDR-L3 region
QQCFSTPWT

SEQ ID NO: 17190 - protein, 11 aa, Artificial Sequence
  Synthetic polypeptide representing artificial human antibody CDR-L3 region
AAWDDTLNALV

SEQ ID NO: 17191 - protein, 9 aa, Artificial Sequence
  Synthetic polypeptide representing artificial human antibody CDR-L3 region
QQSYSTPFT

SEQ ID NO: 17192 - protein, 10 aa, Artificial Sequence
  Synthetic polypeptide representing artificial human antibody CDR-L3 region
QQLNTYPPRT

SEQ ID NO: 17193 - protein, 10 aa, Artificial Sequence
  Synthetic polypeptide representing artificial human antibody CDR-L3 region
SSYAATNTLI

SEQ ID NO: 17194 - protein, 11 aa, Artificial Sequence
  Synthetic polypeptide representing artificial human antibody CDR-L3 region
QSYDSSLSGVV

SEQ ID NO: 17195 - protein, 9 aa, Artificial Sequence
  Synthetic polypeptide representing artificial human antibody CDR-L3 region
HQRANFPLT

SEQ ID NO: 17196 - protein, 9 aa, Artificial Sequence
  Synthetic polypeptide representing artificial human antibody CDR-L3 region
QQYYNTPLT

SEQ ID NO: 17197 - protein, 11 aa, Artificial Sequence
  Synthetic polypeptide representing artificial human antibody CDR-L3 region
CSYARDYPNWV

SEQ ID NO: 17198 - protein, 11 aa, Artificial Sequence
  Synthetic polypeptide representing artificial human antibody CDR-L3 region
GTWDSSLSAAV

SEQ ID NO: 17199 - protein, 10 aa, Artificial Sequence
  Synthetic polypeptide representing artificial human antibody CDR-L3 region
CSYAGAYNVL

SEQ ID NO: 17200 - protein, 10 aa, Artificial Sequence
  Synthetic polypeptide representing artificial human antibody CDR-L3 region
SSYAKHGILV

SEQ ID NO: 17201 - protein, 11 aa, Artificial Sequence
  Synthetic polypeptide representing artificial human antibody CDR-L3 region
SSWDDSLHGQV

SEQ ID NO: 17202 - protein, 9 aa, Artificial Sequence
  Synthetic polypeptide representing artificial human antibody CDR-L3 region
LQRASLPLT

SEQ ID NO: 17203 - protein, 9 aa, Artificial Sequence
  Synthetic polypeptide representing artificial human antibody CDR-L3 region
AVWADNRWV

SEQ ID NO: 17204 - protein, 10 aa, Artificial Sequence
  Synthetic polypeptide representing artificial human antibody CDR-L3 region
SSYTGSGTVI

SEQ ID NO: 17205 - protein, 9 aa, Artificial Sequence
  Synthetic polypeptide representing artificial human antibody CDR-L3 region
QQYNSPSYT

SEQ ID NO: 17206 - protein, 10 aa, Artificial Sequence
  Synthetic polypeptide representing artificial human antibody CDR-L3 region
SSEADRYLVI

SEQ ID NO: 17207 - protein, 9 aa, Artificial Sequence
  Synthetic polypeptide representing artificial human antibody CDR-L3 region
LQTTHWPLT

SEQ ID NO: 17208 - protein, 9 aa, Artificial Sequence
  Synthetic polypeptide representing artificial human antibody CDR-L3 region
QQYNSYLWA

SEQ ID NO: 17209 - protein, 9 aa, Artificial Sequence
  Synthetic polypeptide representing artificial human antibody CDR-L3 region
SSYAGTSVI

SEQ ID NO: 17210 - protein, 11 aa, Artificial Sequence
  Synthetic polypeptide representing artificial human antibody CDR-L3 region
SSWDDSLHGQV

SEQ ID NO: 17211 - protein, 8 aa, Artificial Sequence
  Synthetic polypeptide representing artificial human antibody CDR-L3 region
MQGTHLFT

SEQ ID NO: 17212 - protein, 11 aa, Artificial Sequence
  Synthetic polypeptide representing artificial human antibody CDR-L3 region
SSYADTNNFGV

SEQ ID NO: 17213 - protein, 8 aa, Artificial Sequence
  Synthetic polypeptide representing artificial human antibody CDR-L3 region
QQTYNKAT

SEQ ID NO: 17214 - protein, 10 aa, Artificial Sequence
  Synthetic polypeptide representing artificial human antibody CDR-L3 region
SSYTTTGTVL

SEQ ID NO: 17215 - protein, 9 aa, Artificial Sequence
  Synthetic polypeptide representing artificial human antibody CDR-L3 region
QQYGHSPWT

SEQ ID NO: 17216 - protein, 9 aa, Artificial Sequence
  Synthetic polypeptide representing artificial human antibody CDR-L3 region
QQYGNSPLT

SEQ ID NO: 17217 - protein, 9 aa, Artificial Sequence
  Synthetic polypeptide representing artificial human antibody CDR-L3 region
QQYSTSPRT

SEQ ID NO: 17218 - protein, 10 aa, Artificial Sequence
  Synthetic polypeptide representing artificial human antibody CDR-L3 region
SSYAGAYIVI

SEQ ID NO: 17219 - protein, 11 aa, Artificial Sequence
  Synthetic polypeptide representing artificial human antibody CDR-L3 region
SSFAGSDNPFV

SEQ ID NO: 17220 - protein, 9 aa, Artificial Sequence
  Synthetic polypeptide representing artificial human antibody CDR-L3 region
QQYSDNSNT

SEQ ID NO: 17221 - protein, 9 aa, Artificial Sequence
  Synthetic polypeptide representing artificial human antibody CDR-L3 region
QAWDSSTGV

SEQ ID NO: 17222 - protein, 9 aa, Artificial Sequence
  Synthetic polypeptide representing artificial human antibody CDR-L3 region
QQLNSYPYT

SEQ ID NO: 17223 - protein, 9 aa, Artificial Sequence
  Synthetic polypeptide representing artificial human antibody CDR-L3 region
QKYNSAPWT

SEQ ID NO: 17224 - protein, 10 aa, Artificial Sequence
  Synthetic polypeptide representing artificial human antibody CDR-L3 region
SSYITSGGVI

SEQ ID NO: 17225 - protein, 11 aa, Artificial Sequence
  Synthetic polypeptide representing artificial human antibody CDR-L3 region
AAWESTLNAWV

SEQ ID NO: 17226 - protein, 9 aa, Artificial Sequence
  Synthetic polypeptide representing artificial human antibody CDR-L3 region
QQYNDYSFA

SEQ ID NO: 17227 - protein, 9 aa, Artificial Sequence
  Synthetic polypeptide representing artificial human antibody CDR-L3 region
MQGTHWPWT

SEQ ID NO: 17228 - protein, 12 aa, Artificial Sequence
  Synthetic polypeptide representing artificial human antibody CDR-L3 region
QSYGRDLAGLYV

SEQ ID NO: 17229 - protein, 9 aa, Artificial Sequence
  Synthetic polypeptide representing artificial human antibody CDR-L3 region
QQYYSTPQT

SEQ ID NO: 17230 - protein, 11 aa, Artificial Sequence
  Synthetic polypeptide representing artificial human antibody CDR-L3 region
ATWDGSLSAWV

SEQ ID NO: 17231 - protein, 9 aa, Artificial Sequence
  Synthetic polypeptide representing artificial human antibody CDR-L3 region
QQRAKLPLT

SEQ ID NO: 17232 - protein, 9 aa, Artificial Sequence
  Synthetic polypeptide representing artificial human antibody CDR-L3 region
QQYHSPPLT

SEQ ID NO: 17233 - protein, 11 aa, Artificial Sequence
  Synthetic polypeptide representing artificial human antibody CDR-L3 region
CSYATNYPNWV

SEQ ID NO: 17234 - protein, 8 aa, Artificial Sequence
  Synthetic polypeptide representing artificial human antibody CDR-L3 region
QQRSNWYT

SEQ ID NO: 17235 - protein, 11 aa, Artificial Sequence
  Synthetic polypeptide representing artificial human antibody CDR-L3 region
YSTDSSGNHGV

SEQ ID NO: 17236 - protein, 9 aa, Artificial Sequence
  Synthetic polypeptide representing artificial human antibody CDR-L3 region
QTWGPGIQV

SEQ ID NO: 17237 - protein, 10 aa, Artificial Sequence
  Synthetic polypeptide representing artificial human antibody CDR-L3 region
SSYTSSNTII

SEQ ID NO: 17238 - protein, 10 aa, Artificial Sequence
  Synthetic polypeptide representing artificial human antibody CDR-L3 region
SAYAGSNTFP

SEQ ID NO: 17239 - protein, 9 aa, Artificial Sequence
  Synthetic polypeptide representing artificial human antibody CDR-L3 region
QQYLSPPLT

SEQ ID NO: 17240 - protein, 11 aa, Artificial Sequence
  Synthetic polypeptide representing artificial human antibody CDR-L3 region
QQRNNWPPQVT

SEQ ID NO: 17241 - protein, 10 aa, Artificial Sequence
  Synthetic polypeptide representing artificial human antibody CDR-L3 region
SSEADRYLVV

SEQ ID NO: 17242 - protein, 9 aa, Artificial Sequence
  Synthetic polypeptide representing artificial human antibody CDR-L3 region
QKFNSAPWT

SEQ ID NO: 17243 - protein, 9 aa, Artificial Sequence
  Synthetic polypeptide representing artificial human antibody CDR-L3 region
QAWDSRAYV

SEQ ID NO: 17244 - protein, 9 aa, Artificial Sequence
  Synthetic polypeptide representing artificial human antibody CDR-L3 region
FLSYGGARV

SEQ ID NO: 17245 - protein, 10 aa, Artificial Sequence
  Synthetic polypeptide representing artificial human antibody CDR-L3 region
QQYNNWPPLA

SEQ ID NO: 17246 - protein, 12 aa, Artificial Sequence
  Synthetic polypeptide representing artificial human antibody CDR-L3 region
VAWDDSLNGLYV

SEQ ID NO: 17247 - protein, 10 aa, Artificial Sequence
  Synthetic polypeptide representing artificial human antibody CDR-L3 region
SSYTSSSTVI

SEQ ID NO: 17248 - protein, 9 aa, Artificial Sequence
  Synthetic polypeptide representing artificial human antibody CDR-L3 region
QQYYDTPRT

SEQ ID NO: 17249 - protein, 9 aa, Artificial Sequence
  Synthetic polypeptide representing artificial human antibody CDR-L3 region
QQYGNSRLT

SEQ ID NO: 17250 - protein, 10 aa, Artificial Sequence
  Synthetic polypeptide representing artificial human antibody CDR-L3 region
SSYAGSYIVV

SEQ ID NO: 17251 - protein, 8 aa, Artificial Sequence
  Synthetic polypeptide representing artificial human antibody CDR-L3 region
QQATSPYT

SEQ ID NO: 17252 - protein, 9 aa, Artificial Sequence
  Synthetic polypeptide representing artificial human antibody CDR-L3 region
QHYRSSSWT

SEQ ID NO: 17253 - protein, 9 aa, Artificial Sequence
  Synthetic polypeptide representing artificial human antibody CDR-L3 region
QQVNSFPYT

SEQ ID NO: 17254 - protein, 10 aa, Artificial Sequence
  Synthetic polypeptide representing artificial human antibody CDR-L3 region
SSYTGSGTVV

SEQ ID NO: 17255 - protein, 11 aa, Artificial Sequence
  Synthetic polypeptide representing artificial human antibody CDR-L3 region
QSYDSSLSGSV

SEQ ID NO: 17256 - protein, 9 aa, Artificial Sequence
  Synthetic polypeptide representing artificial human antibody CDR-L3 region
QQANSFPRT

SEQ ID NO: 17257 - protein, 9 aa, Artificial Sequence
  Synthetic polypeptide representing artificial human antibody CDR-L3 region
QHYHTVPRT

SEQ ID NO: 17258 - protein, 10 aa, Artificial Sequence
  Synthetic polypeptide representing artificial human antibody CDR-L3 region
QPRGSWRGFT

SEQ ID NO: 17259 - protein, 9 aa, Artificial Sequence
  Synthetic polypeptide representing artificial human antibody CDR-L3 region
QHYNIWPYT

SEQ ID NO: 17260 - protein, 9 aa, Artificial Sequence
  Synthetic polypeptide representing artificial human antibody CDR-L3 region
QQYGGSPRT

SEQ ID NO: 17261 - protein, 8 aa, Artificial Sequence
  Synthetic polypeptide representing artificial human antibody CDR-L3 region
QQYNSYWT

SEQ ID NO: 17262 - protein, 12 aa, Artificial Sequence
  Synthetic polypeptide representing artificial human antibody CDR-L3 region
QSYDRSLSASAV

SEQ ID NO: 17263 - protein, 9 aa, Artificial Sequence
  Synthetic polypeptide representing artificial human antibody CDR-L3 region
QAWDSSTAG

SEQ ID NO: 17264 - protein, 9 aa, Artificial Sequence
  Synthetic polypeptide representing artificial human antibody CDR-L3 region
HQYDSFSWT

SEQ ID NO: 17265 - protein, 9 aa, Artificial Sequence
  Synthetic polypeptide representing artificial human antibody CDR-L3 region
QQLNSFPYT

SEQ ID NO: 17266 - protein, 11 aa, Artificial Sequence
  Synthetic polypeptide representing artificial human antibody CDR-L3 region
SSWDDILHEQV

SEQ ID NO: 17267 - protein, 11 aa, Artificial Sequence
  Synthetic polypeptide representing artificial human antibody CDR-L3 region
QQYGGSPPQLT

SEQ ID NO: 17268 - protein, 9 aa, Artificial Sequence
  Synthetic polypeptide representing artificial human antibody CDR-L3 region
QQSYSTPYT

SEQ ID NO: 17269 - protein, 10 aa, Artificial Sequence
  Synthetic polypeptide representing artificial human antibody CDR-L3 region
YSAADNNGGV

SEQ ID NO: 17270 - protein, 10 aa, Artificial Sequence
  Synthetic polypeptide representing artificial human antibody CDR-L3 region
SSYTTPGTVV

SEQ ID NO: 17271 - protein, 9 aa, Artificial Sequence
  Synthetic polypeptide representing artificial human antibody CDR-L3 region
QQAYTFPFT

SEQ ID NO: 17272 - protein, 8 aa, Artificial Sequence
  Synthetic polypeptide representing artificial human antibody CDR-L3 region
QQYYNTPT

SEQ ID NO: 17273 - protein, 9 aa, Artificial Sequence
  Synthetic polypeptide representing artificial human antibody CDR-L3 region
QQYYILPWT

SEQ ID NO: 17274 - protein, 9 aa, Artificial Sequence
  Synthetic polypeptide representing artificial human antibody CDR-L3 region
QQYLSPPLT

SEQ ID NO: 17275 - protein, 10 aa, Artificial Sequence
  Synthetic polypeptide representing artificial human antibody CDR-L3 region
AAWDYGLHGL

SEQ ID NO: 17276 - protein, 9 aa, Artificial Sequence
  Synthetic polypeptide representing artificial human antibody CDR-L3 region
QQYTTYSRT

SEQ ID NO: 17277 - protein, 9 aa, Artificial Sequence
  Synthetic polypeptide representing artificial human antibody CDR-L3 region
QHYHSVPRT

SEQ ID NO: 17278 - protein, 12 aa, Artificial Sequence
  Synthetic polypeptide representing artificial human antibody CDR-L3 region
AAWDDSLSGHWV

SEQ ID NO: 17279 - protein, 9 aa, Artificial Sequence
  Synthetic polypeptide representing artificial human antibody CDR-L3 region
QQRANLPLT

SEQ ID NO: 17280 - protein, 9 aa, Artificial Sequence
  Synthetic polypeptide representing artificial human antibody CDR-L3 region
LQDYNYPKT

SEQ ID NO: 17281 - protein, 9 aa, Artificial Sequence
  Synthetic polypeptide representing artificial human antibody CDR-L3 region
QQCYGVPLT

SEQ ID NO: 17282 - protein, 10 aa, Artificial Sequence
  Synthetic polypeptide representing artificial human antibody CDR-L3 region
MQGTHWPSWT

SEQ ID NO: 17283 - protein, 10 aa, Artificial Sequence
  Synthetic polypeptide representing artificial human antibody CDR-L3 region
CSYAARGTSV

SEQ ID NO: 17284 - protein, 9 aa, Artificial Sequence
  Synthetic polypeptide representing artificial human antibody CDR-L3 region
LQTTHWPLT

SEQ ID NO: 17285 - protein, 10 aa, Artificial Sequence
  Synthetic polypeptide representing artificial human antibody CDR-L3 region
ASVAGGDNLL

SEQ ID NO: 17286 - protein, 8 aa, Artificial Sequence
  Synthetic polypeptide representing artificial human antibody CDR-L3 region
QHYAAAIT

SEQ ID NO: 17287 - protein, 10 aa, Artificial Sequence
  Synthetic polypeptide representing artificial human antibody CDR-L3 region
QHYNTWPRWT

SEQ ID NO: 17288 - protein, 9 aa, Artificial Sequence
  Synthetic polypeptide representing artificial human antibody CDR-L3 region
QQVHSYPFT

SEQ ID NO: 17289 - protein, 11 aa, Artificial Sequence
  Synthetic polypeptide representing artificial human antibody CDR-L3 region
NSRHSSGNYLV

SEQ ID NO: 17290 - protein, 11 aa, Artificial Sequence
  Synthetic polypeptide representing artificial human antibody CDR-L3 region
YSTDRYADHRV

SEQ ID NO: 17291 - protein, 11 aa, Artificial Sequence
  Synthetic polypeptide representing artificial human antibody CDR-L3 region
ASWDDSLHGYV

SEQ ID NO: 17292 - protein, 11 aa, Artificial Sequence
  Synthetic polypeptide representing artificial human antibody CDR-L3 region
AVWDDSVNAPV

SEQ ID NO: 17293 - protein, 9 aa, Artificial Sequence
  Synthetic polypeptide representing artificial human antibody CDR-L3 region
QHRSNWPLT

SEQ ID NO: 17294 - protein, 9 aa, Artificial Sequence
  Synthetic polypeptide representing artificial human antibody CDR-L3 region
QQYLTSIGT

SEQ ID NO: 17295 - protein, 10 aa, Artificial Sequence
  Synthetic polypeptide representing artificial human antibody CDR-L3 region
SSYTSSSTYV

SEQ ID NO: 17296 - protein, 8 aa, Artificial Sequence
  Synthetic polypeptide representing artificial human antibody CDR-L3 region
QQYKTYPT

SEQ ID NO: 17297 - protein, 9 aa, Artificial Sequence
  Synthetic polypeptide representing artificial human antibody CDR-L3 region
LQDYLYPAT

SEQ ID NO: 17298 - protein, 9 aa, Artificial Sequence
  Synthetic polypeptide representing artificial human antibody CDR-L3 region
QQYYAVPLT

SEQ ID NO: 17299 - protein, 10 aa, Artificial Sequence
  Synthetic polypeptide representing artificial human antibody CDR-L3 region
NSYSRAGYSV

SEQ ID NO: 17300 - protein, 9 aa, Artificial Sequence
  Synthetic polypeptide representing artificial human antibody CDR-L3 region
QQYYSTAWT

SEQ ID NO: 17301 - protein, 9 aa, Artificial Sequence
  Synthetic polypeptide representing artificial human antibody CDR-L3 region
QQYGSSPYT

SEQ ID NO: 17302 - protein, 9 aa, Artificial Sequence
  Synthetic polypeptide representing artificial human antibody CDR-L3 region
QTWGTDTWV

SEQ ID NO: 17303 - protein, 10 aa, Artificial Sequence
  Synthetic polypeptide representing artificial human antibody CDR-L3 region
QAWDNRNLDV

SEQ ID NO: 17304 - protein, 9 aa, Artificial Sequence
  Synthetic polypeptide representing artificial human antibody CDR-L3 region
CSYAGSPYV

SEQ ID NO: 17305 - protein, 10 aa, Artificial Sequence
  Synthetic polypeptide representing artificial human antibody CDR-L3 region
CSYAGSYTYV

SEQ ID NO: 17306 - protein, 9 aa, Artificial Sequence
  Synthetic polypeptide representing artificial human antibody CDR-L3 region
QQYGSSPLT

SEQ ID NO: 17307 - protein, 10 aa, Artificial Sequence
  Synthetic polypeptide representing artificial human antibody CDR-L3 region
GAWDTGLTVM

SEQ ID NO: 17308 - protein, 11 aa, Artificial Sequence
  Synthetic polypeptide representing artificial human antibody CDR-L3 region
AAWDDSLNAWL

SEQ ID NO: 17309 - protein, 9 aa, Artificial Sequence
  Synthetic polypeptide representing artificial human antibody CDR-L3 region
QQANSFPFT

SEQ ID NO: 17310 - protein, 9 aa, Artificial Sequence
  Synthetic polypeptide representing artificial human antibody CDR-L3 region
QQYGSSPRT

SEQ ID NO: 17311 - protein, 9 aa, Artificial Sequence
  Synthetic polypeptide representing artificial human antibody CDR-L3 region
QQSYSTPPT

SEQ ID NO: 17312 - protein, 10 aa, Artificial Sequence
  Synthetic polypeptide representing artificial human antibody CDR-L3 region
QQYDKWPPFT

SEQ ID NO: 17313 - protein, 9 aa, Artificial Sequence
  Synthetic polypeptide representing artificial human antibody CDR-L3 region
QKSDGAPWT

SEQ ID NO: 17314 - protein, 10 aa, Artificial Sequence
  Synthetic polypeptide representing artificial human antibody CDR-L3 region
MQGTHWPPWT

SEQ ID NO: 17315 - protein, 11 aa, Artificial Sequence
  Synthetic polypeptide representing artificial human antibody CDR-L3 region
SSYTSTSTLVV

SEQ ID NO: 17316 - protein, 11 aa, Artificial Sequence
  Synthetic polypeptide representing artificial human antibody CDR-L3 region
GTWDEILGVWV

SEQ ID NO: 17317 - protein, 8 aa, Artificial Sequence
  Synthetic polypeptide representing artificial human antibody CDR-L3 region
MQALQTPA

SEQ ID NO: 17318 - protein, 9 aa, Artificial Sequence
  Synthetic polypeptide representing artificial human antibody CDR-L3 region
QAWDSSTPV

SEQ ID NO: 17319 - protein, 11 aa, Artificial Sequence
  Synthetic polypeptide representing artificial human antibody CDR-L3 region
ATWDDSLSGWV

SEQ ID NO: 17320 - protein, 9 aa, Artificial Sequence
  Synthetic polypeptide representing artificial human antibody CDR-L3 region
QQRSNWPHP

SEQ ID NO: 17321 - protein, 9 aa, Artificial Sequence
  Synthetic polypeptide representing artificial human antibody CDR-L3 region
QQYYSSPYP

SEQ ID NO: 17322 - protein, 11 aa, Artificial Sequence
  Synthetic polypeptide representing artificial human antibody CDR-L3 region
AAWDDSLSGWV

SEQ ID NO: 17323 - protein, 9 aa, Artificial Sequence
  Synthetic polypeptide representing artificial human antibody CDR-L3 region
QMYNTAPWT

SEQ ID NO: 17324 - protein, 10 aa, Artificial Sequence
  Synthetic polypeptide representing artificial human antibody CDR-L3 region
YSYAGSSTWV

SEQ ID NO: 17325 - protein, 11 aa, Artificial Sequence
  Synthetic polypeptide representing artificial human antibody CDR-L3 region
AAWDDSLSGVV

SEQ ID NO: 17326 - protein, 11 aa, Artificial Sequence
  Synthetic polypeptide representing artificial human antibody CDR-L3 region
AAWDDSLNGWV

SEQ ID NO: 17327 - protein, 10 aa, Artificial Sequence
  Synthetic polypeptide representing artificial human antibody CDR-L3 region
QLYDNSPKFT

SEQ ID NO: 17328 - protein, 11 aa, Artificial Sequence
  Synthetic polypeptide representing artificial human antibody CDR-L3 region
GTWDSSLSAGV

SEQ ID NO: 17329 - protein, 10 aa, Artificial Sequence
  Synthetic polypeptide representing artificial human antibody CDR-L3 region
VLYMGSGIWV

SEQ ID NO: 17330 - protein, 9 aa, Artificial Sequence
  Synthetic polypeptide representing artificial human antibody CDR-L3 region
MQGTHWPWT

SEQ ID NO: 17331 - protein, 9 aa, Artificial Sequence
  Synthetic polypeptide representing artificial human antibody CDR-L3 region
MQALQTLYT

SEQ ID NO: 17332 - protein, 11 aa, Artificial Sequence
  Synthetic polypeptide representing artificial human antibody CDR-L3 region
SSYTSSSTPYV

SEQ ID NO: 17333 - protein, 11 aa, Artificial Sequence
  Synthetic polypeptide representing artificial human antibody CDR-L3 region
AAWDDGLNGLA

SEQ ID NO: 17334 - protein, 9 aa, Artificial Sequence
  Synthetic polypeptide representing artificial human antibody CDR-L3 region
TQATQFPFT

SEQ ID NO: 17335 - protein, 12 aa, Artificial Sequence
  Synthetic polypeptide representing artificial human antibody CDR-L3 region
AAWDDSLNGRYV

SEQ ID NO: 17336 - protein, 9 aa, Artificial Sequence
  Synthetic polypeptide representing artificial human antibody CDR-L3 region
HQYNFFPWT

SEQ ID NO: 17337 - protein, 9 aa, Artificial Sequence
  Synthetic polypeptide representing artificial human antibody CDR-L3 region
SSYTSSTRV

SEQ ID NO: 17338 - protein, 10 aa, Artificial Sequence
  Synthetic polypeptide representing artificial human antibody CDR-L3 region
SSYTSTITLV

SEQ ID NO: 17339 - protein, 8 aa, Artificial Sequence
  Synthetic polypeptide representing artificial human antibody CDR-L3 region
QAWGTGIV

SEQ ID NO: 17340 - protein, 10 aa, Artificial Sequence
  Synthetic polypeptide representing artificial human antibody CDR-L3 region
QSYDSSLRRV

SEQ ID NO: 17341 - protein, 11 aa, Artificial Sequence
  Synthetic polypeptide representing artificial human antibody CDR-L3 region
NSRDSSGNHVV

SEQ ID NO: 17342 - protein, 12 aa, Artificial Sequence
  Synthetic polypeptide representing artificial human antibody CDR-L3 region
CSYGTTPTSPYV

SEQ ID NO: 17343 - protein, 11 aa, Artificial Sequence
  Synthetic polypeptide representing artificial human antibody CDR-L3 region
QQSGSSPPMYT

SEQ ID NO: 17344 - protein, 10 aa, Artificial Sequence
  Synthetic polypeptide representing artificial human antibody CDR-L3 region
HHYGSSPAWT

SEQ ID NO: 17345 - protein, 9 aa, Artificial Sequence
  Synthetic polypeptide representing artificial human antibody CDR-L3 region
MQHTHWPHT

SEQ ID NO: 17346 - protein, 11 aa, Artificial Sequence
  Synthetic polypeptide representing artificial human antibody CDR-L3 region
SSYAGSNNFVV

SEQ ID NO: 17347 - protein, 9 aa, Artificial Sequence
  Synthetic polypeptide representing artificial human antibody CDR-L3 region
CSYAGGPFV

SEQ ID NO: 17348 - protein, 8 aa, Artificial Sequence
  Synthetic polypeptide representing artificial human antibody CDR-L3 region
YSAADQGV

SEQ ID NO: 17349 - protein, 9 aa, Artificial Sequence
  Synthetic polypeptide representing artificial human antibody CDR-L3 region
HQYRHRPST

SEQ ID NO: 17350 - protein, 11 aa, Artificial Sequence
  Synthetic polypeptide representing artificial human antibody CDR-L3 region
ASWDDSLNGVV

SEQ ID NO: 17351 - protein, 9 aa, Artificial Sequence
  Synthetic polypeptide representing artificial human antibody CDR-L3 region
LQLNSYPLT

SEQ ID NO: 17352 - protein, 9 aa, Artificial Sequence
  Synthetic polypeptide representing artificial human antibody CDR-L3 region
QRYNLAPWT

SEQ ID NO: 17353 - protein, 11 aa, Artificial Sequence
  Synthetic polypeptide representing artificial human antibody CDR-L3 region
GTWDTSLHIVV

SEQ ID NO: 17354 - protein, 11 aa, Artificial Sequence
  Synthetic polypeptide representing artificial human antibody CDR-L3 region
AAWDDSLSGVV

SEQ ID NO: 17355 - protein, 9 aa, Artificial Sequence
  Synthetic polypeptide representing artificial human antibody CDR-L3 region
QTWDTGVWV

SEQ ID NO: 17356 - protein, 10 aa, Artificial Sequence
  Synthetic polypeptide representing artificial human antibody CDR-L3 region
QQLIEHPPLT

SEQ ID NO: 17357 - protein, 11 aa, Artificial Sequence
  Synthetic polypeptide representing artificial human antibody CDR-L3 region
AAWDDSLNGLV

SEQ ID NO: 17358 - protein, 9 aa, Artificial Sequence
  Synthetic polypeptide representing artificial human antibody CDR-L3 region
QQANSFPLT

SEQ ID NO: 17359 - protein, 9 aa, Artificial Sequence
  Synthetic polypeptide representing artificial human antibody CDR-L3 region
QQYNSYPWT

SEQ ID NO: 17360 - protein, 10 aa, Artificial Sequence
  Synthetic polypeptide representing artificial human antibody CDR-L3 region
QQRSNWPPLT

SEQ ID NO: 17361 - protein, 9 aa, Artificial Sequence
  Synthetic polypeptide representing artificial human antibody CDR-L3 region
QTWGSGVWV

SEQ ID NO: 17362 - protein, 9 aa, Artificial Sequence
  Synthetic polypeptide representing artificial human antibody CDR-L3 region
QTWGTGPWV

SEQ ID NO: 17363 - protein, 9 aa, Artificial Sequence
  Synthetic polypeptide representing artificial human antibody CDR-L3 region
MQAFLFPYT

SEQ ID NO: 17364 - protein, 10 aa, Artificial Sequence
  Synthetic polypeptide representing artificial human antibody CDR-L3 region
QQSYSTPPDT

SEQ ID NO: 17365 - protein, 8 aa, Artificial Sequence
  Synthetic polypeptide representing artificial human antibody CDR-L3 region
QQYFHMGT

SEQ ID NO: 17366 - protein, 11 aa, Artificial Sequence
  Synthetic polypeptide representing artificial human antibody CDR-L3 region
AAWDDSLTSLL

SEQ ID NO: 17367 - protein, 9 aa, Artificial Sequence
  Synthetic polypeptide representing artificial human antibody CDR-L3 region
QQYGSLPFA

SEQ ID NO: 17368 - protein, 9 aa, Artificial Sequence
  Synthetic polypeptide representing artificial human antibody CDR-L3 region
KQGSHGPHT

SEQ ID NO: 17369 - protein, 9 aa, Artificial Sequence
  Synthetic polypeptide representing artificial human antibody CDR-L3 region
MQAVQTPWT

SEQ ID NO: 17370 - protein, 10 aa, Artificial Sequence
  Synthetic polypeptide representing artificial human antibody CDR-L3 region
QTWASGFWGV

SEQ ID NO: 17371 - protein, 8 aa, Artificial Sequence
  Synthetic polypeptide representing artificial human antibody CDR-L3 region
VQRHWPWT

SEQ ID NO: 17372 - protein, 11 aa, Artificial Sequence
  Synthetic polypeptide representing artificial human antibody CDR-L3 region
AVWDDYLDGPV

SEQ ID NO: 17373 - protein, 11 aa, Artificial Sequence
  Synthetic polypeptide representing artificial human antibody CDR-L3 region
QCFDTRLSGSV

SEQ ID NO: 17374 - protein, 9 aa, Artificial Sequence
  Synthetic polypeptide representing artificial human antibody CDR-L3 region
QQTYSNPRT

SEQ ID NO: 17375 - protein, 10 aa, Artificial Sequence
  Synthetic polypeptide representing artificial human antibody CDR-L3 region
ASYAGGDTWV

SEQ ID NO: 17376 - protein, 9 aa, Artificial Sequence
  Synthetic polypeptide representing artificial human antibody CDR-L3 region
QQYDNWPRT

SEQ ID NO: 17377 - protein, 9 aa, Artificial Sequence
  Synthetic polypeptide representing artificial human antibody CDR-L3 region
QQYNIFPYT

SEQ ID NO: 17378 - protein, 9 aa, Artificial Sequence
  Synthetic polypeptide representing artificial human antibody CDR-L3 region
QQYGRSPVT

SEQ ID NO: 17379 - protein, 9 aa, Artificial Sequence
  Synthetic polypeptide representing artificial human antibody CDR-L3 region
QQYNTYPIT

SEQ ID NO: 17380 - protein, 10 aa, Artificial Sequence
  Synthetic polypeptide representing artificial human antibody CDR-L3 region
LSYGGDYTYV

SEQ ID NO: 17381 - protein, 11 aa, Artificial Sequence
  Synthetic polypeptide representing artificial human antibody CDR-L3 region
QSHDDFLGGAI

SEQ ID NO: 17382 - protein, 11 aa, Artificial Sequence
  Synthetic polypeptide representing artificial human antibody CDR-L3 region
QSYDSSLFGGV

SEQ ID NO: 17383 - protein, 11 aa, Artificial Sequence
  Synthetic polypeptide representing artificial human antibody CDR-L3 region
SSAPTKIALEV

SEQ ID NO: 17384 - protein, 9 aa, Artificial Sequence
  Synthetic polypeptide representing artificial human antibody CDR-L3 region
QSYDGNNWV

SEQ ID NO: 17385 - protein, 9 aa, Artificial Sequence
  Synthetic polypeptide representing artificial human antibody CDR-L3 region
QHYNKWPYT

SEQ ID NO: 17386 - protein, 10 aa, Artificial Sequence
  Synthetic polypeptide representing artificial human antibody CDR-L3 region
CSFAGSSTYV

SEQ ID NO: 17387 - protein, 9 aa, Artificial Sequence
  Synthetic polypeptide representing artificial human antibody CDR-L3 region
QQYNNWPYT

SEQ ID NO: 17388 - protein, 9 aa, Artificial Sequence
  Synthetic polypeptide representing artificial human antibody CDR-L3 region
QQASGFPYT

SEQ ID NO: 17389 - protein, 9 aa, Artificial Sequence
  Synthetic polypeptide representing artificial human antibody CDR-L3 region
QHYLKWPYT

SEQ ID NO: 17390 - protein, 9 aa, Artificial Sequence
  Synthetic polypeptide representing artificial human antibody CDR-L3 region
QQYDSYPLT

SEQ ID NO: 17391 - protein, 9 aa, Artificial Sequence
  Synthetic polypeptide representing artificial human antibody CDR-L3 region
QQYGSSPRT

SEQ ID NO: 17392 - protein, 9 aa, Artificial Sequence
  Synthetic polypeptide representing artificial human antibody CDR-L3 region
QQYGSSPGT

SEQ ID NO: 17393 - protein, 9 aa, Artificial Sequence
  Synthetic polypeptide representing artificial human antibody CDR-L3 region
QQYYSSPQT

SEQ ID NO: 17394 - protein, 11 aa, Artificial Sequence
  Synthetic polypeptide representing artificial human antibody CDR-L3 region
NSRDSSGNHLV

SEQ ID NO: 17395 - protein, 11 aa, Artificial Sequence
  Synthetic polypeptide representing artificial human antibody CDR-L3 region
SAWDDSLSVVL

SEQ ID NO: 17396 - protein, 9 aa, Artificial Sequence
  Synthetic polypeptide representing artificial human antibody CDR-L3 region
MQGTHWPYT

SEQ ID NO: 17397 - protein, 9 aa, Artificial Sequence
  Synthetic polypeptide representing artificial human antibody CDR-L3 region
QQCYGSPLT

SEQ ID NO: 17398 - protein, 11 aa, Artificial Sequence
  Synthetic polypeptide representing artificial human antibody CDR-L3 region
SSYGGRNNFWV

SEQ ID NO: 17399 - protein, 9 aa, Artificial Sequence
  Synthetic polypeptide representing artificial human antibody CDR-L3 region
HQSIHLPYT

SEQ ID NO: 17400 - protein, 9 aa, Artificial Sequence
  Synthetic polypeptide representing artificial human antibody CDR-L3 region
QQYNSFAYT

SEQ ID NO: 17401 - protein, 9 aa, Artificial Sequence
  Synthetic polypeptide representing artificial human antibody CDR-L3 region
QKYNSAPWT

SEQ ID NO: 17402 - protein, 10 aa, Artificial Sequence
  Synthetic polypeptide representing artificial human antibody CDR-L3 region
QQRSNWPSIT

SEQ ID NO: 17403 - protein, 10 aa, Artificial Sequence
  Synthetic polypeptide representing artificial human antibody CDR-L3 region
ISFTSSGTYV

SEQ ID NO: 17404 - protein, 10 aa, Artificial Sequence
  Synthetic polypeptide representing artificial human antibody CDR-L3 region
CSYAGSMTWV

SEQ ID NO: 17405 - protein, 8 aa, Artificial Sequence
  Synthetic polypeptide representing artificial human antibody CDR-L3 region
QHYSSLYT

SEQ ID NO: 17406 - protein, 11 aa, Artificial Sequence
  Synthetic polypeptide representing artificial human antibody CDR-L3 region
SSYGGSNIFYV

SEQ ID NO: 17407 - protein, 9 aa, Artificial Sequence
  Synthetic polypeptide representing artificial human antibody CDR-L3 region
KQDYNYPHT

SEQ ID NO: 17408 - protein, 12 aa, Artificial Sequence
  Synthetic polypeptide representing artificial human antibody CDR-L3 region
CSYTTIPDHTWV

SEQ ID NO: 17409 - protein, 11 aa, Artificial Sequence
  Synthetic polypeptide representing artificial human antibody CDR-L3 region
QSHDSSLSIWV

SEQ ID NO: 17410 - protein, 9 aa, Artificial Sequence
  Synthetic polypeptide representing artificial human antibody CDR-L3 region
QSYDNNNWV

SEQ ID NO: 17411 - protein, 9 aa, Artificial Sequence
  Synthetic polypeptide representing artificial human antibody CDR-L3 region
QQYASYPMT

SEQ ID NO: 17412 - protein, 9 aa, Artificial Sequence
  Synthetic polypeptide representing artificial human antibody CDR-L3 region
QQRGTWPYT

SEQ ID NO: 17413 - protein, 11 aa, Artificial Sequence
  Synthetic polypeptide representing artificial human antibody CDR-L3 region
QSYDSGLSVYV

SEQ ID NO: 17414 - protein, 9 aa, Artificial Sequence
  Synthetic polypeptide representing artificial human antibody CDR-L3 region
QQFSLYPIT

SEQ ID NO: 17415 - protein, 9 aa, Artificial Sequence
  Synthetic polypeptide representing artificial human antibody CDR-L3 region
QQANSFPIT

SEQ ID NO: 17416 - protein, 9 aa, Artificial Sequence
  Synthetic polypeptide representing artificial human antibody CDR-L3 region
QQYGSSPYT

SEQ ID NO: 17417 - protein, 9 aa, Artificial Sequence
  Synthetic polypeptide representing artificial human antibody CDR-L3 region
QQAYSFPVT

SEQ ID NO: 17418 - protein, 9 aa, Artificial Sequence
  Synthetic polypeptide representing artificial human antibody CDR-L3 region
QQRSSWPLT

SEQ ID NO: 17419 - protein, 9 aa, Artificial Sequence
  Synthetic polypeptide representing artificial human antibody CDR-L3 region
QQYDKWPPS

SEQ ID NO: 17420 - protein, 9 aa, Artificial Sequence
  Synthetic polypeptide representing artificial human antibody CDR-L3 region
QQYGSSPLT

SEQ ID NO: 17421 - protein, 11 aa, Artificial Sequence
  Synthetic polypeptide representing artificial human antibody CDR-L3 region
QSYDISLSGYV

SEQ ID NO: 17422 - protein, 10 aa, Artificial Sequence
  Synthetic polypeptide representing artificial human antibody CDR-L3 region
ETWDTDSRGV

SEQ ID NO: 17423 - protein, 9 aa, Artificial Sequence
  Synthetic polypeptide representing artificial human antibody CDR-L3 region
QAWDSSTAV

SEQ ID NO: 17424 - protein, 10 aa, Artificial Sequence
  Synthetic polypeptide representing artificial human antibody CDR-L3 region
VLYMTSGNWV

SEQ ID NO: 17425 - protein, 8 aa, Artificial Sequence
  Synthetic polypeptide representing artificial human antibody CDR-L3 region
QAWDSTVV

SEQ ID NO: 17426 - protein, 9 aa, Artificial Sequence
  Synthetic polypeptide representing artificial human antibody CDR-L3 region
QQLNSYPFT

SEQ ID NO: 17427 - protein, 9 aa, Artificial Sequence
  Synthetic polypeptide representing artificial human antibody CDR-L3 region
QTWASGIRV

SEQ ID NO: 17428 - protein, 9 aa, Artificial Sequence
  Synthetic polypeptide representing artificial human antibody CDR-L3 region
QTWGSGIRV

SEQ ID NO: 17429 - protein, 9 aa, Artificial Sequence
  Synthetic polypeptide representing artificial human antibody CDR-L3 region
QQYDTYPVT

SEQ ID NO: 17430 - protein, 9 aa, Artificial Sequence
  Synthetic polypeptide representing artificial human antibody CDR-L3 region
QQRHSWPLT

SEQ ID NO: 17431 - protein, 9 aa, Artificial Sequence
  Synthetic polypeptide representing artificial human antibody CDR-L3 region
QHLKSYPFA

SEQ ID NO: 17432 - protein, 9 aa, Artificial Sequence
  Synthetic polypeptide representing artificial human antibody CDR-L3 region
QQYYSTPYT

SEQ ID NO: 17433 - protein, 8 aa, Artificial Sequence
  Synthetic polypeptide representing artificial human antibody CDR-L3 region
QQSYSTPN

SEQ ID NO: 17434 - protein, 10 aa, Artificial Sequence
  Synthetic polypeptide representing artificial human antibody CDR-L3 region
QTWANWNTWI

SEQ ID NO: 17435 - protein, 9 aa, Artificial Sequence
  Synthetic polypeptide representing artificial human antibody CDR-L3 region
LQDCEYPLT

SEQ ID NO: 17436 - protein, 9 aa, Artificial Sequence
  Synthetic polypeptide representing artificial human antibody CDR-L3 region
LTWGAGFRV

SEQ ID NO: 17437 - protein, 8 aa, Artificial Sequence
  Synthetic polypeptide representing artificial human antibody CDR-L3 region
QQRVSWPT

SEQ ID NO: 17438 - protein, 9 aa, Artificial Sequence
  Synthetic polypeptide representing artificial human antibody CDR-L3 region
QQYNGWPYT

SEQ ID NO: 17439 - protein, 9 aa, Artificial Sequence
  Synthetic polypeptide representing artificial human antibody CDR-L3 region
QTWDTGIRV

SEQ ID NO: 17440 - protein, 11 aa, Artificial Sequence
  Synthetic polypeptide representing artificial human antibody CDR-L3 region
QVWDSNNDHQV

SEQ ID NO: 17441 - protein, 11 aa, Artificial Sequence
  Synthetic polypeptide representing artificial human antibody CDR-L3 region
ATWDDSLSRPV

SEQ ID NO: 17442 - protein, 9 aa, Artificial Sequence
  Synthetic polypeptide representing artificial human antibody CDR-L3 region
QQYYSTPIT

SEQ ID NO: 17443 - protein, 9 aa, Artificial Sequence
  Synthetic polypeptide representing artificial human antibody CDR-L3 region
QQYKNWPQT

SEQ ID NO: 17444 - protein, 8 aa, Artificial Sequence
  Synthetic polypeptide representing artificial human antibody CDR-L3 region
MQGTHWRT

SEQ ID NO: 17445 - protein, 9 aa, Artificial Sequence
  Synthetic polypeptide representing artificial human antibody CDR-L3 region
QQYGSSPLT

SEQ ID NO: 17446 - protein, 9 aa, Artificial Sequence
  Synthetic polypeptide representing artificial human antibody CDR-L3 region
QQYGSSPRT

SEQ ID NO: 17447 - protein, 9 aa, Artificial Sequence
  Synthetic polypeptide representing artificial human antibody CDR-L3 region
QQSYSTPRT

SEQ ID NO: 17448 - protein, 10 aa, Artificial Sequence
  Synthetic polypeptide representing artificial human antibody CDR-L3 region
SSYTSSSTLV

SEQ ID NO: 17449 - protein, 9 aa, Artificial Sequence
  Synthetic polypeptide representing artificial human antibody CDR-L3 region
MQALQTPWT

SEQ ID NO: 17450 - protein, 10 aa, Artificial Sequence
  Synthetic polypeptide representing artificial human antibody CDR-L3 region
QQYNHWPLIT

SEQ ID NO: 17451 - protein, 9 aa, Artificial Sequence
  Synthetic polypeptide representing artificial human antibody CDR-L3 region
QQYYATPPT

SEQ ID NO: 17452 - protein, 11 aa, Artificial Sequence
  Synthetic polypeptide representing artificial human antibody CDR-L3 region
SAWDSTLSVWV

SEQ ID NO: 17453 - protein, 11 aa, Artificial Sequence
  Synthetic polypeptide representing artificial human antibody CDR-L3 region
ATWDTSLSSGW

SEQ ID NO: 17454 - protein, 9 aa, Artificial Sequence
  Synthetic polypeptide representing artificial human antibody CDR-L3 region
YSAADNNRV

SEQ ID NO: 17455 - protein, 10 aa, Artificial Sequence
  Synthetic polypeptide representing artificial human antibody CDR-L3 region
QSADSSGTYV

SEQ ID NO: 17456 - protein, 10 aa, Artificial Sequence
  Synthetic polypeptide representing artificial human antibody CDR-L3 region
QQYDNWPPVT

SEQ ID NO: 17457 - protein, 9 aa, Artificial Sequence
  Synthetic polypeptide representing artificial human antibody CDR-L3 region
QQFYATPPT

SEQ ID NO: 17458 - protein, 12 aa, Artificial Sequence
  Synthetic polypeptide representing artificial human antibody CDR-L3 region
QVWDSSSDHHVV

SEQ ID NO: 17459 - protein, 8 aa, Artificial Sequence
  Synthetic polypeptide representing artificial human antibody CDR-L3 region
QQYNSYWT

SEQ ID NO: 17460 - protein, 9 aa, Artificial Sequence
  Synthetic polypeptide representing artificial human antibody CDR-L3 region
QQYSTYPLT

SEQ ID NO: 17461 - protein, 11 aa, Artificial Sequence
  Synthetic polypeptide representing artificial human antibody CDR-L3 region
QSYDIVRDQMV

SEQ ID NO: 17462 - protein, 10 aa, Artificial Sequence
  Synthetic polypeptide representing artificial human antibody CDR-L3 region
SSYTTSTTYV

SEQ ID NO: 17463 - protein, 10 aa, Artificial Sequence
  Synthetic polypeptide representing artificial human antibody CDR-L3 region
LLYCGDSQQV

SEQ ID NO: 17464 - protein, 10 aa, Artificial Sequence
  Synthetic polypeptide representing artificial human antibody CDR-L3 region
QSYDSSLNAL

SEQ ID NO: 17465 - protein, 11 aa, Artificial Sequence
  Synthetic polypeptide representing artificial human antibody CDR-L3 region
QSYDAGLSAVV

SEQ ID NO: 17466 - protein, 10 aa, Artificial Sequence
  Synthetic polypeptide representing artificial human antibody CDR-L3 region
VLYMGSGIWV

SEQ ID NO: 17467 - protein, 10 aa, Artificial Sequence
  Synthetic polypeptide representing artificial human antibody CDR-L3 region
QVWDTNTLRV

SEQ ID NO: 17468 - protein, 9 aa, Artificial Sequence
  Synthetic polypeptide representing artificial human antibody CDR-L3 region
QTWGSGIRV

SEQ ID NO: 17469 - protein, 9 aa, Artificial Sequence
  Synthetic polypeptide representing artificial human antibody CDR-L3 region
QQSYSTPYT

SEQ ID NO: 17470 - protein, 10 aa, Artificial Sequence
  Synthetic polypeptide representing artificial human antibody CDR-L3 region
QSGDSSVTYV

SEQ ID NO: 17471 - protein, 9 aa, Artificial Sequence
  Synthetic polypeptide representing artificial human antibody CDR-L3 region
QQYGTSPIT

SEQ ID NO: 17472 - protein, 9 aa, Artificial Sequence
  Synthetic polypeptide representing artificial human antibody CDR-L3 region
SLWYDGVRV

SEQ ID NO: 17473 - protein, 9 aa, Artificial Sequence
  Synthetic polypeptide representing artificial human antibody CDR-L3 region
QQYGSSSIT

SEQ ID NO: 17474 - protein, 9 aa, Artificial Sequence
  Synthetic polypeptide representing artificial human antibody CDR-L3 region
QQYNSYPLT

SEQ ID NO: 17475 - protein, 9 aa, Artificial Sequence
  Synthetic polypeptide representing artificial human antibody CDR-L3 region
QQYYSTPRT

SEQ ID NO: 17476 - protein, 12 aa, Artificial Sequence
  Synthetic polypeptide representing artificial human antibody CDR-L3 region
AAWDDSLSALYV

SEQ ID NO: 17477 - protein, 9 aa, Artificial Sequence
  Synthetic polypeptide representing artificial human antibody CDR-L3 region
QQIYSTLRT

SEQ ID NO: 17478 - protein, 12 aa, Artificial Sequence
  Synthetic polypeptide representing artificial human antibody CDR-L3 region
QVWDSTTDHNVV

SEQ ID NO: 17479 - protein, 11 aa, Artificial Sequence
  Synthetic polypeptide representing artificial human antibody CDR-L3 region
QSYDISLRGSV

SEQ ID NO: 17480 - protein, 9 aa, Artificial Sequence
  Synthetic polypeptide representing artificial human antibody CDR-L3 region
QQLNSYPQT

SEQ ID NO: 17481 - protein, 9 aa, Artificial Sequence
  Synthetic polypeptide representing artificial human antibody CDR-L3 region
QQYYTTPYT

SEQ ID NO: 17482 - protein, 12 aa, Artificial Sequence
  Synthetic polypeptide representing artificial human antibody CDR-L3 region
SSYAGNSKHNYV

SEQ ID NO: 17483 - protein, 12 aa, Artificial Sequence
  Synthetic polypeptide representing artificial human antibody CDR-L3 region
AAWDDSLDGHWV

SEQ ID NO: 17484 - protein, 9 aa, Artificial Sequence
  Synthetic polypeptide representing artificial human antibody CDR-L3 region
QQRSNWPFT

SEQ ID NO: 17485 - protein, 11 aa, Artificial Sequence
  Synthetic polypeptide representing artificial human antibody CDR-L3 region
QSYDSSLSGYV

SEQ ID NO: 17486 - protein, 9 aa, Artificial Sequence
  Synthetic polypeptide representing artificial human antibody CDR-L3 region
LLSYSGASV

SEQ ID NO: 17487 - protein, 11 aa, Artificial Sequence
  Synthetic polypeptide representing artificial human antibody CDR-L3 region
AAWDDSLSGWV

SEQ ID NO: 17488 - protein, 10 aa, Artificial Sequence
  Synthetic polypeptide representing artificial human antibody CDR-L3 region
SSYTSSSTQV

SEQ ID NO: 17489 - protein, 8 aa, Artificial Sequence
  Synthetic polypeptide representing artificial human antibody CDR-L3 region
QAWDSSVV

SEQ ID NO: 17490 - protein, 10 aa, Artificial Sequence
  Synthetic polypeptide representing artificial human antibody CDR-L3 region
QQYNNWPPLT

SEQ ID NO: 17491 - protein, 11 aa, Artificial Sequence
  Synthetic polypeptide representing artificial human antibody CDR-L3 region
SSWDSGLSAVV

SEQ ID NO: 17492 - protein, 11 aa, Artificial Sequence
  Synthetic polypeptide representing artificial human antibody CDR-L3 region
ATWDDGLSRPV

SEQ ID NO: 17493 - protein, 10 aa, Artificial Sequence
  Synthetic polypeptide representing artificial human antibody CDR-L3 region
QQFGNSPLYT

SEQ ID NO: 17494 - protein, 11 aa, Artificial Sequence
  Synthetic polypeptide representing artificial human antibody CDR-L3 region
LTWDYSLNARV

SEQ ID NO: 17495 - protein, 12 aa, Artificial Sequence
  Synthetic polypeptide representing artificial human antibody CDR-L3 region
QSVVKDVTPYVI

SEQ ID NO: 17496 - protein, 11 aa, Artificial Sequence
  Synthetic polypeptide representing artificial human antibody CDR-L3 region
AAWDDSLSGPV

SEQ ID NO: 17497 - protein, 10 aa, Artificial Sequence
  Synthetic polypeptide representing artificial human antibody CDR-L3 region
QQYNNWPPLT

SEQ ID NO: 17498 - protein, 9 aa, Artificial Sequence
  Synthetic polypeptide representing artificial human antibody CDR-L3 region
QQYNSYPWT

SEQ ID NO: 17499 - protein, 10 aa, Artificial Sequence
  Synthetic polypeptide representing artificial human antibody CDR-L3 region
QQSYSTPPWT

SEQ ID NO: 17500 - protein, 9 aa, Artificial Sequence
  Synthetic polypeptide representing artificial human antibody CDR-L3 region
QQLNSYPFT

SEQ ID NO: 17501 - protein, 128 aa, Artificial Sequence
  Synthetic polypeptide representing artificial human antibody VH domain
EVQLVESGGGLVQPGGSLRLSCAASGFTFTTYWMHWVRQAPGKGLEWVSHINTDGSATNYADSVKGRFTISRDNAKNSLYLQMNSLRAEDTAVYYCARDTARGGQCEPGHKPPCRGAWGQGTLVTVSS

SEQ ID NO: 17502 - protein, 126 aa, Artificial Sequence
  Synthetic polypeptide representing artificial human antibody VH domain
QVTLKESGPVLVKPTETLTLTCTVSGFSLSNRRMGVSWVRQPPGKALEWLAHIFSNDEKSYSTSLKSRLSISKDTSKSQVVLTMTNVDPVDTATYYCVRIGTEMILWYFYYYMDVWGKGTTVTVSS

SEQ ID NO: 17503 - protein, 126 aa, Artificial Sequence; identical to SEQ ID NO: 17502
  Synthetic polypeptide representing artificial human antibody VH domain

SEQ ID NO: 17504 - protein, 126 aa, Artificial Sequence; identical to SEQ ID NO: 17502
  Synthetic polypeptide representing artificial human antibody VH domain

SEQ ID NO: 17505 - protein, 126 aa, Artificial Sequence; identical to SEQ ID NO: 17502
  Synthetic polypeptide representing artificial human antibody VH domain

SEQ ID NO: 17506 - protein, 126 aa, Artificial Sequence; identical to SEQ ID NO: 17502
  Synthetic polypeptide representing artificial human antibody VH domain

SEQ ID NO: 17507 - protein, 126 aa, Artificial Sequence; identical to SEQ ID NO: 17502
  Synthetic polypeptide representing artificial human antibody VH domain

SEQ ID NO: 17508 - protein, 121 aa, Artificial Sequence
  Synthetic polypeptide representing artificial human antibody VH domain
EVQLVESGGGLVKPGGSLRLSCAASGFTFSSYSMNWVRQAPGKGLEWVGRIKRKSDGGTTDYAAPVKGRFTISRDDSKNTLYLQMNSLKTEDTAVYYCTTDLHDYGDSDYWGQGTLVTVSS

SEQ ID NO: 17509 - protein, 121 aa, Artificial Sequence; identical to SEQ ID NO: 17508
  Synthetic polypeptide representing artificial human antibody VH domain

SEQ ID NO: 17510 - protein, 122 aa, Artificial Sequence
  Synthetic polypeptide representing artificial human antibody VH domain
QLQLQESGPGLVKPSETLSLTCTVSGGSLSSSSYYWGWIRQPPGKGLEWIGSIYYTGSTYYNPSLESRVTISDDTSKNQFSLKLSSVTAADTAIYYCAASPLYDSSDFYYSWGQGALVTVSS

SEQ ID NO: 17511 - protein, 123 aa, Artificial Sequence
  Synthetic polypeptide representing artificial human antibody VH domain
EVQLVESGGGLNQPGGSLRLSCAASEFTVSSNYMTWVRQAPGKGLEWVSVIYSGGGTHYAESVKGRFTISRDNAKNSLYLQMNSLRVEDTAMYYCAGQSPSVYSSGWYVFDYWGQGTLVTVSS

SEQ ID NO: 17512 - protein, 124 aa, Artificial Sequence
  Synthetic polypeptide representing artificial human antibody VH domain
EVQLVESGGGLVKPGGSLRLSCAASGFTFSSYAMSWVRQAPGKGLEWVSSISSSSSYIYYADSVKGRFTISRDNAKNSLYLQMNSLRAEDTAVYYCARDAFFSLKYGAYGMDVWGQGTTVTVSS

SEQ ID NO: 17513 - protein, 124 aa, Artificial Sequence
  Synthetic polypeptide representing artificial human antibody VH domain
EVQLLESGGGLVQPGGSLRLSCAASGFTFSSYAMSWVRQAPGKGLEWVSAISGSGGSTYYADSVKGRFTISRDNSKNTLYLQMNSLRAEDTAVYYCAKDPAMYSSSWLSPSDVWGQGTTVTVSS

SEQ ID NO: 17514 - protein, 131 aa, Artificial Sequence
  Synthetic polypeptide representing artificial human antibody VH domain
QVQLQESGPGLVKPSQTLSLTCTVSGGSISSSNWWSWVRQPPGKGLEWIGEINHSGSTNYNPSLKSRVTISVDTSKNQFSLKLSSVTAADTAVYYCARVVHRRSSYYDSRNYYYYYYMDVWGKGTTVTVSS

SEQ ID NO: 17515 - protein, 131 aa, Artificial Sequence
  Synthetic polypeptide representing artificial human antibody VH domain
QITLKESGPTLVKPTQTLTLTCTFSGFSLSTSGVGVGWIRQPPGKALEWLALIYWDDDKRYSPSLKSRLTITKDTSKNQVVLTMTNMDPVDTATYYCAHIPPESRMVLFGVVIQNYYFDYWGQGTLVTVSS

SEQ ID NO: 17516 - protein, 128 aa, Artificial Sequence
  Synthetic polypeptide representing artificial human antibody VH domain
QVQLVESGGGVVQPGRSLRLSCTASGFAFNNFGFHWVRQAPGKGLEWVAVIWHDGSQQHYADSVKGRFTISRDNSKNTLHLQMNSLRDEDTAVYYCAREAAGILRFLEWSTKGYFDYWGQGTLVTVSS

SEQ ID NO: 17517 - protein, 120 aa, Artificial Sequence
  Synthetic polypeptide representing artificial human antibody VH domain
QVQLGQSGAEVKRPGASVRVSCKASGYTFTGHYIHWVRQAPGQGLEWMGWINPNSGGTNYAQKFQGRVTMTRDTSINTAYMELSRLTSDDTAVYYCARGPRTTVPNLDYWGQGTLVTVSS

SEQ ID NO: 17518 - protein, 120 aa, Artificial Sequence
  Synthetic polypeptide representing artificial human antibody VH domain
QVQLVQSGSELKRPGASVKVSCKASGYTFTSYAMHWVRQAPGQGLEWMGWINTNTGSPTYAQGFTGRFVFSLDTSVSTAYLQISSLKAEDTAVYYCARDHGDWYLSVDYWGQGTLVTVSS

SEQ ID NO: 17519 - protein, 123 aa, Artificial Sequence
  Synthetic polypeptide representing artificial human antibody VH domain
QVQLVQSGAEVKKPGASVKVSCTASGYTFTDYFMHWVRQAPGQGLEWMGWINPNSGGTNYAQKFQGRVTMTRDTSITTAYMELLRLQSDDTAVYYCVRDFIGVYSLHEAFDLWGQGTMVTVSA

SEQ ID NO: 17520 - protein, 124 aa, Artificial Sequence
  Synthetic polypeptide representing artificial human antibody VH domain
EVHLVESGGGLVQPGRSLSLSCAASGFIFDDHGMHWVRQVPGKGLEWVSGISYNSRSIGYADSVKGRFTVSRDSAKKSLYLHMNSLKVEDTAFYYCARDKSRSYYASGSYPDYWGQGTLVTVSS

SEQ ID NO: 17521 - protein, 125 aa, Artificial Sequence
  Synthetic polypeptide representing artificial human antibody VH domain
QVQLVQSGAEVKKPGSSVKVSCRASGGTFSGFAISWVRQAPGQGLEWMGGIIPIFDTRNYAQKFQGRVAVTVDESTSTAYMELSGLRFDDTAVYYCARGRDIVVEPAPLDAFDVWGHGTMVTVSS

SEQ ID NO: 17522 - protein, 119 aa, Artificial Sequence
  Synthetic polypeptide representing artificial human antibody VH domain
QVQLVESGGAVVQPGRSLRLSCAASGFSFSNYNIHWARQAPGKGLEWLSIIHHDENDKRYADSVKGRFTISRDNSKNTVYLQMNSLRPEDTGVYYCARDFTSGSSGDCWGQGTLVTVSS

SEQ ID NO: 17523 - protein, 122 aa, Artificial Sequence
  Synthetic polypeptide representing artificial human antibody VH domain
QVQLVQSGAEVKKPGASVKVSCKVSGYTLTELSMHWVRQAPGKGLEWMGGFDPEDGETIYAQKFQGRVTMTEDTSTDTAYMELSSLRSEDTAVYYCATGSGSYYSMGWFDPWGQGTLVTVSS

SEQ ID NO: 17524 - protein, 131 aa, Artificial Sequence
  Synthetic polypeptide representing artificial human antibody VH domain
QVQLVQSGAEVKKPGASVKVSCKASGYTFTSYAMHWVRQAPGQRLEWMGWINAGNGNTKYSQKFQGRVTITRDTSASTAYMELSSLRSEDTAVYYCAIRGADCSGGSCYFVSAFGWIMDVWGQGTTVTVSS

SEQ ID NO: 17525 - protein, 129 aa, Artificial Sequence
  Synthetic polypeptide representing artificial human antibody VH domain
QVQLVQSGAEVKKPGASVKVSCKVSGYTLTELSMHWVRQAPGKGLEWMGGFDPEDGETIYAQKFQGRVTMTEDTSTDTAYMELSSLRSEDTAVYYCATAGPQYYYGSGSYAPYNWFDPWGQGTLVTVSS

SEQ ID NO: 17526 - protein, 126 aa, Artificial Sequence
  Synthetic polypeptide representing artificial human antibody VH domain
QVQLVESGGGVVQPGKSLRVSCAASGFHFSSYAMHWVRQAPGKGLEWVAVLSYDGSFKKYADSVKGRFTISRDNSKNTLFLEMSGLRAEDTAVYYCARDSVLLFFGYLPHGAFDMWGQGTMVTVSS

SEQ ID NO: 17527 - protein, 122 aa, Artificial Sequence
  Synthetic polypeptide representing artificial human antibody VH domain
EVPLLESGGGLVQPGGSLRLSCLASGFTFSNYAMSWVRQAPGKGLEWVSTIHGGGTTTHSADSVKGRFSVSRDNGKNTLYLQMDSLRVEDTAVYYCAKASTGSSYGFALDTWGLGTMVTVSS

SEQ ID NO: 17528 - protein, 135 aa, Artificial Sequence
  Synthetic polypeptide representing artificial human antibody VH domain
QVQLVESGGGVVQPGRSLRLSCAASGFTFSSYAMHWVRQAPGKGLEWVAVISYDGSNKYYADSVKGRFTISRDNSKNTLYLQMNSLRAEDTTVYYCARDGGSPGEYYDSSGYYGFGYYYYGMDVWGQGTTVTVSS

SEQ ID NO: 17529 - protein, 125 aa, Artificial Sequence
  Synthetic polypeptide representing artificial human antibody VH domain
QVQLVESGGGVVQPGRSLRLSCAASGFTFSSYGMHWVRQAPGKGLEWVAVIWYDGSNKYYADSVKGRFTISRDNSKNTLYLQMNSLRAEDTAVYYCARDGGVRGVIIYYYGMDVWGQGTTVTVSS

SEQ ID NO: 17530 - protein, 121 aa, Artificial Sequence
  Synthetic polypeptide representing artificial human antibody VH domain
QVQLVESGGGVVQPGRSLRLSCAASGFTFSRYAFHWVRQAPGKGLEWVAIVSYAGNTEYNTDSMKGRFTISRDNSKNTVYLQMNSLRAEDTAVYFCAREWEDYDSSVFDYWGQGTLVTVSS

SEQ ID NO: 17531 - protein, 122 aa, Artificial Sequence
  Synthetic polypeptide representing artificial human antibody VH domain
QVQLVQSGAEVKKPGASVKVSCKASGYTFTSYDINWVRQATGQGLEWMGWMNPNSGNTGYAQKFQGRVTMTRNTSISTAYMELSSLRSEDTAVYYCARDYGDDEAYYGMDVWGQGTTVTVSS

SEQ ID NO: 17532 - protein, 125 aa, Artificial Sequence
  Synthetic polypeptide representing artificial human antibody VH domain
QVQLVQSGAEVKKPGASVKVSCKASGYTFINNRISWVRQAPGQGLEWMGWISAYNRNTNYAASFQGRVTMTIDTYTSISYMELRSLRFDDTAVYYCARDGSDRSGYDSFYDMDVWGQGTTVTVSS

SEQ ID NO: 17533 - protein, 124 aa, Artificial Sequence
  Synthetic polypeptide representing artificial human antibody VH domain
EVQLVESGGDLVEPGRSLRLSCTASGFTFGDFAMSWFRQAPGKGLEWVGFIRSKVYGATTEYAASVKGRFTISRDDSKSIAYLQMNSLKTEDTAVYYCIRCRRSSGPYYYFDYWGQGTLVTVSS

SEQ ID NO: 17534 - protein, 121 aa, Artificial Sequence
  Synthetic polypeptide representing artificial human antibody VH domain
QVQLQVSGPGLVKPSETLSLTCTVSIGSISSHYWTWIRQTPGKGLEWVGFVHYSGSTNYNPSLKSRLTISIDPSKNQFSLRLTSVSAADTATYYCARGQYEMLTGYFVDYWGPGTLVTVSS

SEQ ID NO: 17535 - protein, 113 aa, Artificial Sequence
  Synthetic polypeptide representing artificial human antibody VH domain
EVRLLQSGGGLVQPGESLRLSCAASGFTFKKYLMNWVRQAPGKGLEWVSIIDSGGEKTHYADSVKGRFTISRDNSKNTLYLEMNSLRAEDSAVYYCAPVGLLWGQGSLVTVSS

SEQ ID NO: 17536 - protein, 122 aa, Artificial Sequence
  Synthetic polypeptide representing artificial human antibody VH domain
EVHLVESGGGLVHPGRSLRLSCAASGFIFDDYAMFWVRQSPGKGLEWVSGISWNSDDIGYADSVKGRFTISRDNAKNSLYLQMNSLRAEDTAIYYCTKGSFHNSGRGIFDSWGQGTLVNVSS

SEQ ID NO: 17537 - protein, 127 aa, Artificial Sequence
  Synthetic polypeptide representing artificial human antibody VH domain
EVQLVESGGGLVQPGGSLRLSCAASGFTFSSYAMHWVRQAPGKGLEYVSAISSNGGSTYYANSVKGRFTISRDNSKNTLYLQMGSLRAEDMAVYYCARDRERLRYFDWVYYYGMDVWGQGTTVTVSS

SEQ ID NO: 17538 - protein, 119 aa, Artificial Sequence
  Synthetic polypeptide representing artificial human antibody VH domain
QVQLVQSGAEVKKPGSSVKVSCKASGGTFSSYAISWVRQAPGQGLEWMGRIIPILGIANYAQKFQGRVTITADKSTSTAYMELSSLRSEDTAVYYCARDGGAAAGFDYWGQGTLVTVSS

SEQ ID NO: 17539 - protein, 125 aa, Artificial Sequence
  Synthetic polypeptide representing artificial human antibody VH domain
QVQLVQSGAEVKKPGASVKVSCKASGYTFTSYDINWVRQATGQGLEWMGWMNPNSGNTGYAQKFQGRVTMTRNTSISTAYMELSSLRSEDTAVYYCARVAHSLRYFDWPLAFDIWGQGTMVTVSS

SEQ ID NO: 17540 - protein, 123 aa, Artificial Sequence
  Synthetic polypeptide representing artificial human antibody VH domain
EVQLLESGGGLVQPGGSLRLSCAASGFTFSSYAMSWVRQAPGKGLEWVSVIYNDGIGTFYADSVKGRFTISRENSKNTLYLQMDTLRVEDTALYYCAKLLGNSGELLFPFDSWGQGTLVSVSS

SEQ ID NO: 17541 - protein, 129 aa, Artificial Sequence
  Synthetic polypeptide representing artificial human antibody VH domain
EVQLVESGGGLVQPGRSLRLSCAASGFTFDDYAMHWVRQAPGKGLEWVSGISWNSGSIGYADSVKGRFTISRDNAKNSLYLQMNSLRAEDTALYYCAKDMSPLLWFGELLGYYYGMDVWGQGTTVTVSS

SEQ ID NO: 17542 - protein, 124 aa, Artificial Sequence
  Synthetic polypeptide representing artificial human antibody VH domain
EVQLVESGGGLVQPGRSLRLSCRSFGFSLGKFWMSWVRQTPGKGLEWVATIKQDGREQYYVDSVRGRFSVSRDNAKGSVNLQLNSLRIDDTAMYYCAREFTGRWDDMGYYGDLWGQGTLVTVSP

SEQ ID NO: 17543 - protein, 122 aa, Artificial Sequence
  Synthetic polypeptide representing artificial human antibody VH domain
QVQLVQSGAEVKNPGASVTVSCKASGFTFVSFAVHWVRQAPGQRLEWMGRINAVNGNTKYSQKFQGRVTITRDTSASTAYMDLSSLRFEDTAVYYCTRVGYYYDGSVVFDYWGQGTLVTVSS

SEQ ID NO: 17544 - protein, 127 aa, Artificial Sequence
  Synthetic polypeptide representing artificial human antibody VH domain
QVQLQESGPGLVKPSETLSLTCTVSGGSISRYYWSWIRQPPGKGLEWIGYIYYSGSTNYNPSLKSRVTISVDTSKNQFSLKLSSVTAADTAVYYCAGEGLATLYGSGSYRVGYFDHWGQGTLVTVSS

SEQ ID NO: 17545 - protein, 125 aa, Artificial Sequence
  Synthetic polypeptide representing artificial human antibody VH domain
QLQLQESGPGLVKPSETLSLTCTVSGGSISSSSYYWGWIRQPPGKGLEWIGSIYYSGSTYYNPSLKSRVTISVDTSKNQFSLKLSSVTAADTAVYYCARHSPIWLTQVSPYFDYWGQGTLVTVSS

SEQ ID NO: 17546 - protein, 129 aa, Artificial Sequence
  Synthetic polypeptide representing artificial human antibody VH domain
QVQLVESGGGVVQPGRSLRLSCAASGFTFSSYGMHWVRQAPGKGLEWVAVISYDGSNKYYADSVKGRFTISRDNSKNTLYLQMNSLRAEDTAVYYCAKDSAPPYHSSGWYYYYYGMDVWGQGTTVTVSS

SEQ ID NO: 17547 - protein, 118 aa, Artificial Sequence
  Synthetic polypeptide representing artificial human antibody VH domain
QVQLVQSGAEVKKPGASVKVSCKISGYRLTEVAMHWVRQAPGQGLEWMGSFDPQDEEPIYAQKLQGRVTMTEDTSSDTAYMQLSRLSSDDTAVYYCATSPWDVTLEYWGQGTLVTVSS

SEQ ID NO: 17548 - protein, 124 aa, Artificial Sequence
  Synthetic polypeptide representing artificial human antibody VH domain
EVQLLESGGGLVQPGGSLRLSCVVSGFTFGDHAMSWVRQAPGKGLEWVSSISGSGNGAHYADSVRGRFTLSRDNSKNTVSLQMNNLRAEDTATYFCAKVNYDDDRVELAYFEHWGPGTLVTVSS

SEQ ID NO: 17549 - protein, 121 aa, Artificial Sequence
  Synthetic polypeptide representing artificial human antibody VH domain
QVQLVESGGGVVQPGRSLRLSCAASGFSFSRYAMHWVRQAPGKGLEWVAVISFDGSIKYFADYVKGRFTISRDTSKQTLYLQMNSLRPDDTAVYYCAKGTHDSRDYKFDFWGQGTLVTVSS

SEQ ID NO: 17550 - protein, 127 aa, Artificial Sequence
  Synthetic polypeptide representing artificial human antibody VH domain
EVFLVESGGGLVQPGGSLRLSCAASGFTFSTHWMTWVRQAPGKGLEWVANIKHDGSEKFYVDSVKGRFTISRDNAKNSMYLQMNSLRAEDTAVYYCAREACASCSCAPGCAYGLDVWGQGTTVTVSS

SEQ ID NO: 17551 - protein, 118 aa, Artificial Sequence
  Synthetic polypeptide representing artificial human antibody VH domain
EVQLVESGGRLVQPGGSLRLSCAVSGFTFRSYWMTWVRQAPGKGLEWVANINQGGNERYYVDSGKGRFTVSRDNAQNLLFLQMNSLRVEDTAVYYCARDGVWYASDSWGQGTLVTVSS

SEQ ID NO: 17552 - protein, 127 aa, Artificial Sequence
  Synthetic polypeptide representing artificial human antibody VH domain
QMQLVQSGPEVKKPGTSVKVSCKASGFTFTSSAMQWVRQARGQRLEWIGWIVVGSGNTNYAQKFQERVTITRDMSTSTAYMELSSLRSEDTAVYYCAAAGGEGWLRQYYYYYGMDVWGQGTTVTVSS

SEQ ID NO: 17553 - protein, 121 aa, Artificial Sequence
  Synthetic polypeptide representing artificial human antibody VH domain
QVQLVQSGAEVKKPGASVTVSCKTSGYSFTTYGISWVRQAPGQGLEWMGWISAFNGFTNYAQKFQGRVTMTAETSTDTAYLELRSLTSDDTAIYYCARRDGDYGWSYFDYWGQGTLVTVSS

SEQ ID NO: 17554 - protein, 128 aa, Artificial Sequence
  Synthetic polypeptide representing artificial human antibody VH domain
EVQLVESGGGLVKPGGSLRLSCAASGFTFSSYSMNWVRQAPGKGLEWVSSISSSSSYIYYADSVKGRFTISRDNAKNSLYLQMNSLRAEDTAVYYCARVLRSSWYFPVKPMNDAFDIWGQGTMVTVSS

SEQ ID NO: 17555 - protein, 124 aa, Artificial Sequence
  Synthetic polypeptide representing artificial human antibody VH domain
QVQLQQSGPGLVKPSQTLSLTCAISGDSVSSNSAAWNWIRQSPSRGLEWLGRTYYRSKWYNDYAVSVKSRITINPDTSKNQFSLQLNSVTPEDTAVYYCARDRTGGYYGYFDYWGQGTLVTVSS

SEQ ID NO: 17556 - protein, 122 aa, Artificial Sequence
  Synthetic polypeptide representing artificial human antibody VH domain
QITLKESGPTLVKPTQTLTLTCTFSGFSLSTSTVGVGWIRQPPGKALEWLALVYWDDDKRYSPSLKSRFTITKDTSRNQVVLTMTNMDPVDTATYFCAHSGYYGSGLAFNIWGQGTMVTVSS

SEQ ID NO: 17557 - protein, 122 aa, Artificial Sequence
  Synthetic polypeptide representing artificial human antibody VH domain
EVQLVESGGGLVKPGGSLRLSCAASGFTFSSYSMNWVRQAPGKGLEWVSSISSSSSYIYYADSVKGRFTISRDNAKNSLYLQMNSLRAEDTAVYYCARDPHYDILTGYYDYWGQGTLVTVSS

SEQ ID NO: 17558 - protein, 125 aa, Artificial Sequence
  Synthetic polypeptide representing artificial human antibody VH domain
QVQLVQSGAEVKKPGASVKVSCKASGYTFTGYYMHWVRQAPGQGLEWMGWINPNSGGTNYAQKFQGWVTMTRDTSISTAYMELSRLRSDDTAVYYCARGIAAAGTRYYYYGMDVWGQGTTVTVSS

SEQ ID NO: 17559 - protein, 128 aa, Artificial Sequence
  Synthetic polypeptide representing artificial human antibody VH domain
QVQLVESGGGVVQPGRSLRLSCAASGFTFSSYGMHWVRQAPGKGLEWVAVISYDGSNKYYADSVKGRFTISRDNSKNTLYLQMNSLRAEDTAVYYCAKDIGLRSSWGFNYYYYGMDVWGQGTTVTVSS

SEQ ID NO: 17560 - protein, 113 aa, Artificial Sequence
  Synthetic polypeptide representing artificial human antibody VH domain
EVRLVESGGGLIRPGGSLRLSCAASGFSISDNYVNWVRQAPGKGLEWVSITYSGGDTLYADSVKGRFTVSRDNSKNTLYLQMNSLGAADTAVYYCARETFDLWGQGTMVTVSS

SEQ ID NO: 17561 - protein, 120 aa, Artificial Sequence
  Synthetic polypeptide representing artificial human antibody VH domain
QITLKESGPTLVKPTQTLTLTCTFSGFSLSTSGVGVGWIRQPPGKALEWLALIYWDDDKRYSPSLKSRLTITKDTSKNQVVLTMTNMDPVDTATYYCAHTTGTTPLFDYWGQGTLVTVSS

SEQ ID NO: 17562 - protein, 120 aa, Artificial Sequence
  Synthetic polypeptide representing artificial human antibody VH domain
QVQLVESGGGVVQPGRSLRLSCAASGFTFSSYGMHWVRQAPGKGLEWVAVIWYDGSNKYYADSVKGRFTISRDNSKNTLYLQMNSLRAEDTAVYYCARDHGVDGSPGGYWGQGTLVTVSS

SEQ ID NO: 17563 - protein, 127 aa, Artificial Sequence
  Synthetic polypeptide representing artificial human antibody VH domain
QVQLVESGGGVVQPGRSLRLSCAASGFTFSSYGMHWVRQAPGKGLEWVAVIWYDGSNKYYADSVKGRFTISRDNSKNTLYLQMNSLRAEDTAVYYCARDENTGSSWPFSYYYGMDVWGQGTTVTVSS

SEQ ID NO: 17564 - protein, 121 aa, Artificial Sequence
  Synthetic polypeptide representing artificial human antibody VH domain
EVQLVESGGGLVKPGGSLRLSCAASGFTFSSYSMNWVRQAPGKGLEWVSSISSSSSYIYYADSVKGRFTISRDNAKNSLYLQMNSLRAEDTAVYYCARYNSYYYYYGMDVWGQGTTVTVSS

SEQ ID NO: 17565 - protein, 119 aa, Artificial Sequence
  Synthetic polypeptide representing artificial human antibody VH domain
QITLKESGPTLVKPTQTLTLTCTFSGFSLSTSGVGVGWIRQPPGKALEWLALIYWDDDKRYSPSLKSRLTITKDTSKNQVVLTMTNMDPVDTATYYCAHRLTINGMDVWGQGTTVTVSS

SEQ ID NO: 17566 - protein, 121 aa, Artificial Sequence
  Synthetic polypeptide representing artificial human antibody VH domain
EVQLLESGGGLVQPGGSLRLSCVASGFTFSSYAMNWVRQAPGKGLEWVSVVYTSGDNTHYADSVKGRFTISRDNSKNMLYLQMNSLRAEDTAIYHCAKARAGSGWHVFDDWGQGTLVTVSS

SEQ ID NO: 17567 - protein, 116 aa, Artificial Sequence
  Synthetic polypeptide representing artificial human antibody VH domain
QVQLQESGPGLVKPPETLSLTCTVSGGSISSFYWSWIRQPPGKGLEWIGYIYYSGNTNYNPSLKSRVTMSLDTSKNQFSLNLNSVTAADTAVYYCARVGAGSFDYWGQGTLVTVSS

SEQ ID NO: 17568 - protein, 126 aa, Artificial Sequence
  Synthetic polypeptide representing artificial human antibody VH domain
EVQLVESGGGLVQPGGSLRLSCVVSGFTFKTYSMNWVRQAPGKGLEWVAYINSDNSRIHYADSVKGRLTISRDNAKNSLFLQMNSLRDEDTAVYYCVRDWTRTATTDFYYYGMDVWGQGTTVTVSS

SEQ ID NO: 17569 - protein, 125 aa, Artificial Sequence
  Synthetic polypeptide representing artificial human antibody VH domain
EVQLLESGGGLVQPGGSLRLSCAASGFTFSGYGMTWVRQAPGNGLEWVSVIFGGGGPMTTFYADSVKGRFTISRDNSKNTLFLQMNSLRVDDTAVYYCAKAKMEGPGSPLGLDVWGRGTTVTVSS

SEQ ID NO: 17570 - protein, 131 aa, Artificial Sequence
  Synthetic polypeptide representing artificial human antibody VH domain
EVQLLESGGGLVQPGGSLRLSCAASGFTFSSYAMSWVRQAPGKGLEWVSAISGSGGSTYYADSVKGRFTISRDNSKNTLYLQMNSLRAEDTAVYYCAKLDNTMVRGVTLLGHYYYYGMDVWGQGTTVTVSS

SEQ ID NO: 17571 - protein, 127 aa, Artificial Sequence
  Synthetic polypeptide representing artificial human antibody VH domain
EVQLVESGGGLVQPGGSLKLSCAASGFAFSGSAMHWVRQASGKGLEWVGRIRSKTNTYATAYAASVKGRFTISRDESKNTAYLQMDSLKTEDTAVYYCTRHVEGTMRLVDPYFFDYWGRGTLVTVSS

SEQ ID NO: 17572 - protein, 123 aa, Artificial Sequence
  Synthetic polypeptide representing artificial human antibody VH domain
QLQLQESGPGLVKPSETLSLTCTVSDGSSSRNYYFWGWVRQPPGKGLEWIGSVSYRGETFYDPSLKGRVTISVNMSKNQFSLKLNSVTAADSAVYYCATHFSTYRSAYQFDYWGQGTLVTVSS

SEQ ID NO: 17573 - protein, 122 aa, Artificial Sequence
  Synthetic polypeptide representing artificial human antibody VH domain
EVQLVESGGGLVQPGRSLRLSCAASGFTFDDYAMHWVRQAPGKGLEWVSGISWNSGSIGYADSVKGRFTISRDNAKNSLYLQMNSLRAEDTALYYCAKDLSSGWSPRGMDVWGQGTTVTVSS

SEQ ID NO: 17574 - protein, 126 aa, Artificial Sequence
  Synthetic polypeptide representing artificial human antibody VH domain
QVQLVQSGSELKKPGASVKVSCKASGYTFTSYAMNWVRQAPGQGLEWMGWINTNTGNPTYAQGFTGRFVFSLDTSVSTAYLQISSLKAEDTAVYYCARALVVPAAIDYYYYGMDVWGQGTTVTVSS

SEQ ID NO: 17575 - protein, 121 aa, Artificial Sequence
  Synthetic polypeptide representing artificial human antibody VH domain
EVLLAQSGGGLIHPGGSLRLSCAASGFNVSNNYLTWVRQAQGKGLEWVSIIYDVGHTYYADSVKGRFTISRDTSKNMLYLQMNSLRPEDTAVYYCYSAYRSKGNDDGMDVWGQGTGVTVSS

SEQ ID NO: 17576 - protein, 126 aa, Artificial Sequence
  Synthetic polypeptide representing artificial human antibody VH domain
EVQLVESGGGLVKPGGSLRLSCAASGFTFSSYSMNWVRQAPGKGLEWVSSISSSSSYIYYADSVKGRFTISRDNAKNSLYLQMNSLRAEDTAVYYCARTRQWELLYYYYYYGMDVWGQGTTVTVSS

SEQ ID NO: 17577 - protein, 122 aa, Artificial Sequence
  Synthetic polypeptide representing artificial human antibody VH domain
EVHLVESGGGLVQPGRSLRLSCAASGFMFDGYAMFWVRQAPGKGLEWVSGISWNGDDIGYADSVKGRFTISRDNAKNSLYLQMNSLRAEDTALYYCTKGNFHNSGRGIFDSWGQGTLVTVSS

SEQ ID NO: 17578 - protein, 120 aa, Artificial Sequence
  Synthetic polypeptide representing artificial human antibody VH domain
EVQLVESGGGLVQPGRSLRLSCAASGFTFDDYAMHWVRQAPGKGLEWVSGISWNSGSIGYADSVKGRFTISRDNAKNSLYLQMNSLRAEDTALYYCAKVDHYDSSGVDYWGQGTLVTVSS

SEQ ID NO: 17579 - protein, 127 aa, Artificial Sequence
  Synthetic polypeptide representing artificial human antibody VH domain
EVQLVESGGGLVKPGGSLRLSCAASGFTFSSYSMNWVRQAPGKGLEWVSSISSSSSYIYYADSVKGRFTISRDNAKNSLYLQMNSLRAEDTAVYYCARAPVDVLLWFGEDFYYFDYWGQGTLVTVSS

SEQ ID NO: 17580 - protein, 124 aa, Artificial Sequence
  Synthetic polypeptide representing artificial human antibody VH domain
EVQLLESGGGLVQPGGSLRLSCAASGFTFSSYAMSWVRQAPGKGLEWVSAISGSGGSTYYADSVKGRFTISRDNSKNTLYLQMNSLRPEDTAVYYCAKDHLWFGELFKNWFDPWGQGTLVTVSS

SEQ ID NO: 17581 - protein, 127 aa, Artificial Sequence
  Synthetic polypeptide representing artificial human antibody VH domain
EVQLVESGGGLVQPGGSLRLSCAASGFTFSSYWMHWVRQAPGKGLVWVSRINSDGSSTSYADSVKGRFTISRDNAKNTLYLQMNSLRAEDTAVYYCARDLSGYYDILTGYSYYFDYWGQGTLVTVSS

SEQ ID NO: 17582 - protein, 119 aa, Artificial Sequence
  Synthetic polypeptide representing artificial human antibody VH domain
QVQLVQSGAEVKKPGASVKVSCKASGYTFTSYDINWVRQATGQGLEWMGWMNPNSGNTGYAQKFQGRVTMTRNTSISTAYMELSSLRSEDTAVYYCARGGQRWLQLGYWGQGTLVTVSS

SEQ ID NO: 17583 - protein, 120 aa, Artificial Sequence
  Synthetic polypeptide representing artificial human antibody VH domain
QVQLVESGGGVVQPGRSLRLSCAASGFTFSSYAMHWVRQAPGKGLEWVAVISYDGSNKYYADSVKGRFTISRDNSKNTLYLQMNSLRAEDTAVYYCARPSSGSYYGAIFWGQGTLVTVSS

SEQ ID NO: 17584 - protein, 120 aa, Artificial Sequence
  Synthetic polypeptide representing artificial human antibody VH domain
QVTLRESGPALVKPTQTLTLTCTFSGFSLSTSGMCVSWIRQPPGKALEWLARIDWDDDKYYSTSLKTRLTISKDTSKNQVVLTMTNMDPVDTATYYCARSLAVAALMDVWGQGTTVTVSS

SEQ ID NO: 17585 - protein, 129 aa, Artificial Sequence
  Synthetic polypeptide representing artificial human antibody VH domain
QVQLVESGGGVVQPGRSLRLSCAASGFTFSSYGMHWVRQAPGKGLEWVAVISYDGSNKYYADSVKGRFTISRDNSKNTLYLQMNSLRAEDTAVYYCAKDSYYGSGSNRGYYYYYGMDVWGQGTTVTVSS

SEQ ID NO: 17586 - protein, 133 aa, Artificial Sequence
  Synthetic polypeptide representing artificial human antibody VH domain
QVQLVQSGAEVKKPGASVKVSCKASGYTFTSYYMHWVRQAPGQGLEWMGIINPSGGSTSYAQKFQGRVTMTRDTSTSTVYMELSSLRSEDTAVYYCARDQTPPNAYDYVWGSYRYIGGEFDYWGQGTLVTVSS

SEQ ID NO: 17587 - protein, 124 aa, Artificial Sequence
  Synthetic polypeptide representing artificial human antibody VH domain
EVQLVESGGGLVQPGGSLRLSCATSGFTFSNFWMSWVRQAPGKGLEWVATIKQDGREQYYVDSVKGRFTISRDNGRRSLSLQLNRLRVDDTATYYCTREFTGRYDDMGYYGDLWGRGSRVTVSS

SEQ ID NO: 17588 - protein, 124 aa, Artificial Sequence
  Synthetic polypeptide representing artificial human antibody VH domain
QVQLVQSGAEVKKPGSSVKVSCKASGGTFSSYAISWVRQAPGQGLEWMGRIIPILGIANYAQKFQGRVTITADKSTSTAYMELSSLRSEDTAVYYCARDFPLYNWNDVGYFDYWGQGTLVTVSS

SEQ ID NO: 17589 - protein, 122 aa, Artificial Sequence
  Synthetic polypeptide representing artificial human antibody VH domain
EVQLVESGGGLVQPGRSLRLSCAASGFTFDDYAMHWVRQAPGKGLEWVSGISWNSGSIGYADSVKGRFTISRDNAKNSLYLQMNSLRAEDTALYYCATLAATPYYYYGMDVWGQGTTVTVSS

SEQ ID NO: 17590 - protein, 122 aa, Artificial Sequence
  Synthetic polypeptide representing artificial human antibody VH domain
EVQLVESGGGLIQPGGSLRLSCAASGFTVSSNYMSWVRQAPGKGLEWVSVIYSGGSTYYADSVKGRFTISRDNSKNTLYLQMNSLRAEDTAVYYCAILWFGEGRLAEYFQHWGQGTLVTVSS

SEQ ID NO: 17591 - protein, 119 aa, Artificial Sequence
  Synthetic polypeptide representing artificial human antibody VH domain
EVQLLESGGHRLQPGGSLRLSCVASRFTFSSHALNWVRQAPGKGLEWVSSITGSGGTTYYADSVRGRFIISRDNSKNTLFLQMNSLRVDDTAFYYCVRGSGSYFPFEEWGQGNLVTVSS

SEQ ID NO: 17592 - protein, 122 aa, Artificial Sequence
  Synthetic polypeptide representing artificial human antibody VH domain
QVQLVQSGAEVKKPGASVKVSCQASGYSFTDYVMFWVRQAPGQRLEWMGWIHPGNGRTAYSQKFQGRVAITRDTSASTAHMELSSLRSEDTATYYCARDLGFTTSWRGPDYWGQGTLVTVSA

SEQ ID NO: 17593 - protein, 119 aa, Artificial Sequence
  Synthetic polypeptide representing artificial human antibody VH domain
QVQLVQSGAEVKKPGASVKVSCRASGYTFSNYVIHWMRQAPGQRLEWMGWIHAGNGKTLYAQNVQGRLTFTGDTSARIVYMELSSLRPEDTTIYYCATEVWGSGYCDYWGQGTLVTVSS

SEQ ID NO: 17594 - protein, 125 aa, Artificial Sequence
  Synthetic polypeptide representing artificial human antibody VH domain
QMQLVQSGAEVKKTGSSVKVSCKASGYTFTYRYLHWVRQAPGQALEWMGWITPFNGNTNYAQKFQDRVTITRDRSMSTAYMELSSLRSEDTAMYYCARSDIAAAGTGYYYGMDVWGQGTTVTVSS

SEQ ID NO: 17595 - protein, 126 aa, Artificial Sequence
  Synthetic polypeptide representing artificial human antibody VH domain
QVQLVQSGAEVKKPGASVKVSCKASGYTFTSYYMHWVRQAPGQGLEWMGIINPSGGSTSYAQKFQGRVTMTRDTSTSTVYMELSSLRSEDTAVYYCARDLLSYSSGWYAGNWFDPWGQGTLVTVSS

SEQ ID NO: 17596 - protein, 126 aa, Artificial Sequence
  Synthetic polypeptide representing artificial human antibody VH domain
QVQLVESGGGVVQPGRSLRLSCAAAGFSFGDYGMHWVRQAPGKGLEWVAVISNDANNHFYAASVKGRYAVSRDTSKNTLYLEMNSLRPEDTAVYFCARGGKGSMLATDIFWYFDLWGRGTLVTVSS

SEQ ID NO: 17597 - protein, 125 aa, Artificial Sequence
  Synthetic polypeptide representing artificial human antibody VH domain
QVQLVQSGAEVKKPGSSVKVSCKASGGTFSSYAISWVRQAPGQGLEWMGRIIPILGIANYAQKFQGRVTITADKSTSTAYMELSSLRSEDTAVYYCARKYCSSTSCYLFDYFDYWGQGTLVTVSS

SEQ ID NO: 17598 - protein, 121 aa, Artificial Sequence
  Synthetic polypeptide representing artificial human antibody VH domain
QVQLVESGGGVVQPGRSLRLSCAASGFTFSSYAMHWVRQAPGKGLEWVAVISYDGSNKYYADSVKGRFTISRDNSKNTLYLQMNSLRAEDTAVYYCARARSGSYYNPFDPWGQGTLVTVSS

SEQ ID NO: 17599 - protein, 126 aa, Artificial Sequence
  Synthetic polypeptide representing artificial human antibody VH domain
EVQLVESGGGLVQPGGSLRLSCAASGFTFSSYWMHWVRQAPGKGLVWVSRINSDGSSTSYADSVKGRFTISRDNAKNTLYLQMNSLRAEDTAVYYCARGEVNYRGIYYYYYGMDVWGQGTTVTVSS

SEQ ID NO: 17600 - protein, 125 aa, Artificial Sequence
  Synthetic polypeptide representing artificial human antibody VH domain
EVHLLESGGNLVQPGGSLRLSCAASGFTFSEYAMSWVRQVPGKGLEWVAGIVGSGGTTYYTDAVHRRFTVSRDNSKNMLYLQMNSLTTEDTALYYCARLTPTSSWYRFLYGMDVWGQGTTVTVSS

SEQ ID NO: 17601 - protein, 121 aa, Artificial Sequence
  Synthetic polypeptide representing artificial human antibody VH domain
QVQLVQSGAEVKKPGASVKVSCKASGYTFTSYDINWVRQATGQGLEWMGWMNPNSGNTGYAQKFQGRVTMTRNTSISTAYMELSSLRSEDTAVYYCARRGSGWLNYGMDVWGQGTTVTVSS

SEQ ID NO: 17602 - protein, 123 aa, Artificial Sequence
  Synthetic polypeptide representing artificial human antibody VH domain
QVQLVESGGGVVQPGRSLRLSCAASGFTFSSYAMHWVRQAPGKGLEWVAVISYDGSNKYYADSVKGRFTISRDNSKNTLYLQMNSLRAEDTAVYYCARDPEFDILTGYHFDYWGQGTLVTVSS

SEQ ID NO: 17603 - protein, 123 aa, Artificial Sequence
  Synthetic polypeptide representing artificial human antibody VH domain
QLQLQESGPGLLNPSETLSLTCTVSYASVSGTTDYWGWIRQPPGKGLEWIGTVFYSGSTYYNPSLESRVSISIDTSKNQFSLTLTSVTAADTAMYYCARLKNFYPSGSYPDYWGQGIQVTVSP

SEQ ID NO: 17604 - protein, 122 aa, Artificial Sequence
  Synthetic polypeptide representing artificial human antibody VH domain
QLQVQESGPGLVKPSETLSLTCTVSGDSISSNGYYWAWIRQPPGEGLEWIGTIYYSESSYYNPSLKSRVSISVDTSKNQISLKLSSVTATDTAVYYCARGRYTYGTTTFDYWGQGTLVTVSS

SEQ ID NO: 17605 - protein, 119 aa, Artificial Sequence
  Synthetic polypeptide representing artificial human antibody VH domain
QVQLVQSEAEMKEPGSSVKVSCKASGGTFTSYAFSWVRQAPGQGLEWMGRIIPVLGKSDYAQRLQGRVTIMADKSTSTVYMELSSLRSDDSAVYYCASDAIAVAQFDSWGQGTLVTVSS

SEQ ID NO: 17606 - protein, 124 aa, Artificial Sequence
  Synthetic polypeptide representing artificial human antibody VH domain
QLQLQESGPGLVKPSETLSLTCTVSGGSISSSSYFWGWIRQPPGKGLEWIGTIYYSGSTYYTPSLKSRVTISVDTSKNQFSLRLNSVTAADTAVYYCASRRFYSGSYLDPFDIWGQGTMVTVSS

SEQ ID NO: 17607 - protein, 121 aa, Artificial Sequence
  Synthetic polypeptide representing artificial human antibody VH domain
QVQLVESGGGVVQPGRSLRLSCAASGFTFSSYAMHWVRQAPGKGLEWVAVISYDGSNKYYADSVKGRFTISRDNSKNTLYLQMNSLRAEDTAVYYCARTGSGSYLDAFDIWGQGTMVTVSS

SEQ ID NO: 17608 - protein, 122 aa, Artificial Sequence
  Synthetic polypeptide representing artificial human antibody VH domain
EVQLVDSGGGLVQPGRSLRLSCAASGFTFDDYAMHWVRQAPGKGLEWVSGISWNSGSIGYADSVKGRFTISRDNAKNSLYLQMNSLRAEDTALYYCAKATGYSSNWYPFDYWGQGTLVTVSS

SEQ ID NO: 17609 - protein, 120 aa, Artificial Sequence
  Synthetic polypeptide representing artificial human antibody VH domain
QLQLQESGPGLAKPSETLSLTCTVSGDSISSSSYYWGWIRQPPGKGLEWIGSIKYSGSTYYNPSLKSRVTISIDTSKKQFSLKLSSVTAADTAVYYCARHGGAPAGLSAWGQGTLVSVSS

SEQ ID NO: 17610 - protein, 129 aa, Artificial Sequence
  Synthetic polypeptide representing artificial human antibody VH domain
EVQLVESGGGLVQPGGSLRLSCAASGFTFSSYWMSWVRQAPGKGLEWVANIKQDGSEKYYVDSVKGRFTISRDNAKNSLYLQMNSLRAEDTAVYYCARDRPGGERYFDWLLSLDAFDIWGQGTMVTVSS

SEQ ID NO: 17611 - protein, 129 aa, Artificial Sequence
  Synthetic polypeptide representing artificial human antibody VH domain
QVQLVESGGGVVQPGRSLRLSCAASGFTFSSYAMHWVRQAPGKGLEWVAVISYDGSNKYYADSVKGRFTISRDNSKNTLYLQMNSLRAEDTAVYYCARDLTTMIVVVITPYYYYGMDVWGQGTTVTVSS

SEQ ID NO: 17612 - protein, 126 aa, Artificial Sequence
  Synthetic polypeptide representing artificial human antibody VH domain
QVQLVQSGAEVKKPGASVKVSCKASGYTFTSYYMHWVRQAPGQGLEWMGIINPSGGSTSYAQKFQGRVTMTRDTSTSTVYMELSSLRSEDTAVYYCAREDYYDSSGSRYYYGMDVWGQGTTVTVSS

SEQ ID NO: 17613 - protein, 122 aa, Artificial Sequence
  Synthetic polypeptide representing artificial human antibody VH domain
QVQLVESGGGVVQPGRSLRLSCAASGFTFSSYAMHWVRQAPGKGLEWVAVISYDGSNKYYADSVKGRFTISRDNSKNTLYLQMNSLRAEDTAVYYCARGDSSSRYYYGMDVWGQGTTVTVSS

SEQ ID NO: 17614 - protein, 126 aa, Artificial Sequence
  Synthetic polypeptide representing artificial human antibody VH domain
QVHLQESGPGLVKPSQTLSLTCTVSGGSISSGSYYWTWIRQPAGKGLEWIGRIYTSGSTNYNTSLKSRVSISEDTSKNQISLTLSSVTAADTAMYYCARENRNYCIGNNCYYFDSWGQGTLVTVSS

SEQ ID NO: 17615 - protein, 123 aa, Artificial Sequence
  Synthetic polypeptide representing artificial human antibody VH domain
QVQLVQSGAEVKKPGASMKVSCKASGYTFTAYYIHWVRQAPGPGLEWMGWINPKSGDTYYARKFQGRVTMTRDTSSTTTYMELSGLDSDDTAMYYCARDGGEDDILTGPRDYWGQGTLLTVSS

SEQ ID NO: 17616 - protein, 121 aa, Artificial Sequence
  Synthetic polypeptide representing artificial human antibody VH domain
QVQLVQSGVEVKKPGASVRVSCKASGYTFTSYGVNWVRQAPGQGLEWMGWISVYNGNTNYARSLQDRVIMTTDTSTRTVYMELRNLRSDDTAVYYCVRAVAGTPYYGMDVWGQGTTVTVSS

SEQ ID NO: 17617 - protein, 121 aa, Artificial Sequence
  Synthetic polypeptide representing artificial human antibody VH domain
QVHLVQSGADVRTPGASLKVSCGASGYKFTAFYIHWVRQAPGHALEWMGWINPSNGARRLAQNFQDRFTMTTDTSINTASMTLSRLTSDDTAVYYCAARGCGDCHPYFDYWGQGTLVTVSS

SEQ ID NO: 17618 - protein, 126 aa, Artificial Sequence
  Synthetic polypeptide representing artificial human antibody VH domain
QVRLEQWGAGQLRPSETLSLTCAVYGDSFRGYYWNWIRQTPGKGLEWIGEINHTGTINYNPSLRSRVAISVDSFKKQLSLKVSSVTDADSAIYFCARGRPANPLWIGPRGYYFDNWGQGTVVTVSA

SEQ ID NO: 17619 - protein, 117 aa, Artificial Sequence
  Synthetic polypeptide representing artificial human antibody VH domain
QVQLQQGGAGLSKPSETLSLTCAISGGSFTANYLSWIRQPPGKGLEWIGEMHHSGTTSYTSPFKSRATISLDTSKNQFTLRLLSVSAEDTAVYYCARQDSHYAFGDWGQGTLVTVSS

SEQ ID NO: 17620 - protein, 121 aa, Artificial Sequence
  Synthetic polypeptide representing artificial human antibody VH domain
EVQLVESGGGLVQPGGSLRLSCAASGFTFGSFDMHWVRQSPGRGLEFVSSISGNGASAYYANSVKGRFTISRDNSKNTLFLQMGSLRGEDAAVYFCARGTTQKLPPHFDYWGQGTLVTVSS

SEQ ID NO: 17621 - protein, 126 aa, Artificial Sequence
  Synthetic polypeptide representing artificial human antibody VH domain
QVRLEQWGAGQLRPSETLSLTCAVYGDSFRGYYWNWIRQPPGKGLEWIGEINHTGTINYNPSLRSRVAISVDSFKKQFSLKMSSVTAADTGVYFCARGRPANPLWIGPRGYYFDYWDQGILVSVSA

SEQ ID NO: 17622 - protein, 121 aa, Artificial Sequence
  Synthetic polypeptide representing artificial human antibody VH domain
QVQLQQWGAGLLKPSDTLSLTCAVYGGSFNAYYWTWIRQPPGKGLEWIGEINHSGSTNYNPSLKSRVSISVDTSKNQFSLKLNSVTAADTGVYYCARYPRESAAGKAFDYWGQGILVTVSS

SEQ ID NO: 17623 - protein, 120 aa, Artificial Sequence
  Synthetic polypeptide representing artificial human antibody VH domain
QVQLVESGGGVVQPGRSLRLSCAASGFTFSSYAMHWVRQAPGKGLEWVAVISYDGSNKYYADSVKGRFTISRDNSKNTLYLQMNSLRAEDTAVYYCARDFSGGYVRVGYWGQGTLVTVSS

SEQ ID NO: 17624 - protein, 118 aa, Artificial Sequence
  Synthetic polypeptide representing artificial human antibody VH domain
QVTLKESGPTLVKPTETLTLSCTFSGFSLTTAGLGVAWIRQPPGKALEWIATIFWDDDKRYRPSLTNRLTITKDTSKNQVFLTMTNMDPVDTATYYCALRGEWQFASWGQGTLVTVSS

SEQ ID NO: 17625 - protein, 129 aa, Artificial Sequence
  Synthetic polypeptide representing artificial human antibody VH domain
EVQLVQSGAEVKKPGESLRISCKGSGYSFTSYWISWVRQMPGKGLEWMGRIDPSDSYTNYSPSFQGHVTISADKSISTAYLQWSSLKASDTAMYYCARHFAGYCSSTSCYTPLNWFDPWGQGTLVTVSS

SEQ ID NO: 17626 - protein, 130 aa, Artificial Sequence
  Synthetic polypeptide representing artificial human antibody VH domain
QVQLQQSGPGLVKPSQTLSLTCAISGDSVSSNSAAWNWIRQSPSRGLEWLGRTYYRSKWYNDYAVSVKSRITINPDTSKNQFSLQLNSVTPEDTAVYYCAREASGVRYFDWLLNYYFDYWGQGTLVTVSS

SEQ ID NO: 17627 - protein, 121 aa, Artificial Sequence
  Synthetic polypeptide representing artificial human antibody VH domain
EVQLVQSGAEVKKPGESLRISCKGSGYSFTSYWISWVRQMPGKGLEWMGRIDPSDSYTNYSPSFQGHVTISADKSISTAYLQWSSLKASDTAMYYCARQEGYFYYYYMDVWGKGTTVTVSS

SEQ ID NO: 17628 - protein, 122 aa, Artificial Sequence
  Synthetic polypeptide representing artificial human antibody VH domain
QVQLQESGPGLVKPSETLSLSCSVSGGSMNSYHWSWVRQSPGKGLEWIGNIYYSGNTNYNPSLKSRVTISVDTPKNQFFLKVTSVTAADTAVYYCARNGLNSGWSMYYFDQWGQGTLVTVSS

SEQ ID NO: 17629 - protein, 132 aa, Artificial Sequence
  Synthetic polypeptide representing artificial human antibody VH domain
QVQLQQWGAGLLKPSETLSLTCAVYGGSFSVYQWSWIRQAPGKGLEWIGEINHSGSTNYNPSLKSRVTISVDTSKNQFSLRLRSVTAADTAVYFCARGQNGVVPAPVLGIGPFYTYSYMDVWGTGTTVRVSS

SEQ ID NO: 17630 - protein, 121 aa, Artificial Sequence
  Synthetic polypeptide representing artificial human antibody VH domain
EVQLVESGGVLVHSGGSLRLSCAASGFNFNIYWMHWVRQAPGKGLEWVSVITNDGGTAFYADAVKGRFTVSRDNAKNNLYLQMNSLTAEDTAVYFCARDRQELGNNWLDSWGQGTLVRVSS

SEQ ID NO: 17631 - protein, 128 aa, Artificial Sequence
  Synthetic polypeptide representing artificial human antibody VH domain
QVQLVQSGAEVKKPGASVKVSCKASGYTFTSYYMHWVRQAPGQGLEWMGIINPSGGSTSYAQKFQGRVTMTRDTSTSTVYMELSSLRSEDTAVYYCARDPTMTTVTTSYYYYYYMDVWGKGTTVTVSS

SEQ ID NO: 17632 - protein, 125 aa, Artificial Sequence
  Synthetic polypeptide representing artificial human antibody VH domain
EVQLVQSGAEVKKPGESLRISCKGSGYSFTSYWISWVRQMPGKGLEWMGRIDPSDSYTNYSPSFQGHVTISADKSISTAYLQWSSLKASDTAMYYCARYEMYCSSTSCYGAFDIWGQGTMVTVSS

SEQ ID NO: 17633 - protein, 122 aa, Artificial Sequence
  Synthetic polypeptide representing artificial human antibody VH domain
QVTLRESGPALVKPTQTLTLTCTFSGFSLSTSGMCVSWIRQPPGKALEWLARIDWDDDKYYSTSLKTRLTISKDTSKNQVVLTMTNMDPVDTAPYYCARFLVGGTKNWFDPWGQGTLVTVSS

SEQ ID NO: 17634 - protein, 129 aa, Artificial Sequence
  Synthetic polypeptide representing artificial human antibody VH domain
QVQLQQWGAGLLKPSETLSLTCAVYGVSPTTYYWSWIRQSPGKGLEWIGEITHSGSTNYNPSHKSRVTMSLDTSKSQFSLKLSSVTAADTAIYYCARGRSEETMIVMVVTGIDFYFDSWGQGTLVTVSS

SEQ ID NO: 17635 - protein, 126 aa, Artificial Sequence
  Synthetic polypeptide representing artificial human antibody VH domain
QVQLVESGGGVVQPGGSLRVSCATSGFTFNNHGMHWVRQAPGKGLEWVAFISYEGSIKNYADSIKGRFTISRDSFSHTLSLQMNSLRAEDTAVYFCAKDSRFFHLGYTYGPIFDYWGQGTLVTVSS

SEQ ID NO: 17636 - protein, 123 aa, Artificial Sequence
  Synthetic polypeptide representing artificial human antibody VH domain
QVQLVQSGAEVKKPGASVKVSCKVSGYTLTELSMHWVRQAPGKGLEWMGGFDPEDGETIYAQKFQGRVTMTEDTSTDTAYMELSSLRSEDTAVYYCATGPPVGATNRHWFDPWGQGTLVTVSS

SEQ ID NO: 17637 - protein, 120 aa, Artificial Sequence
  Synthetic polypeptide representing artificial human antibody VH domain
EVQLVESGGSSVQPGGSLKLSCAAPGFPLSPYWIHWVRQRPGKGLEWVSRTNSDGTTTTYADSVKGRFSISIDNAENMVNLQMNSLRVEDTALYFCARVNGGLSYSFDIWGQGTLVTVSS

SEQ ID NO: 17638 - protein, 129 aa, Artificial Sequence
  Synthetic polypeptide representing artificial human antibody VH domain
QVQLQQWGAGLLKPSETLSLTCAVYGVSPTIYYWSWIRQSPGKGLEWIGEITHSGSTNYNPSLKSRVTMSLDTSKSQFSLKLSSVTAADTAIYYCARGRSEETMIVMVVTGIDFYFDSWGQGTLVTVSS

SEQ ID NO: 17639 - protein, 129 aa, Artificial Sequence
  Synthetic polypeptide representing artificial human antibody VH domain
QVHLQQWGAGLLKPLETLSLTCAVYGESSSDHYWSWIRQPPGKGLEWIGEISQGGSTKYNPSLKSRVTISRDTSKNQFSLKLNSVTAADTAVYYCARGLKGLTMMVVVFTGAYDAFDMWGQGTMVTVSS

SEQ ID NO: 17640 - protein, 116 aa, Artificial Sequence
  Synthetic polypeptide representing artificial human antibody VH domain
EVQLVESGGGLVQPGRSLRLSCAASGFTFDDYAMHWVRQAPGKGLEWVSGISWNSGSIGYADSVKGRFTISRDNAKNSLYLQMNSLRAEDTALYYCVCGDGLIDYWGQGTLVTVSS

SEQ ID NO: 17641 - protein, 129 aa, Artificial Sequence
  Synthetic polypeptide representing artificial human antibody VH domain
QVQLQQWGAGLLKPSETLSLTCAVYGVSPSNYYWTWIRQSPEKGLEWIGEITHSGSANYNPSLRSRVTMSLDTSKSQFSLKMSSVTAADTAMYYCARGRSEETMIVVVVTGIDYYFDSWGQGTLVTVSS

SEQ ID NO: 17642 - protein, 121 aa, Artificial Sequence
  Synthetic polypeptide representing artificial human antibody VH domain
EVRLVQSGPEVKKPGESLRISCKGSGYILTSNWIGWVRQMPGKGLEWMGIIYPGDSDTRYSPSFQGQVTISADNFISTAYLQWSSLKASDTAMYYCANRNTDRTGDAFDIWGQGTMVTVSS

SEQ ID NO: 17643 - protein, 125 aa, Artificial Sequence
  Synthetic polypeptide representing artificial human antibody VH domain
EVQLVESGGGLVQPGGSLRLSCAASGFTFSSYDMHWVRQATGKGLEWVSVIGTAGDTYYPGSVKGRFTISRENAKNSLYLQMNSLRAGDTAVYYCARGLYCGGDCYSILDAFDIWGQGTMVTVSS

SEQ ID NO: 17644 - protein, 121 aa, Artificial Sequence
  Synthetic polypeptide representing artificial human antibody VH domain
QVRLEESGGGLVKPGGSLRLSCTASGFSFSDYYMSWVRQAPGKGLEWISYISSSTHFIKYADSVKGRFTISRDNARNSLYLQMNSLRAEDTAVYYCVRDGVGNTIGYFDYWGQGALVTVSS

SEQ ID NO: 17645 - protein, 124 aa, Artificial Sequence
  Synthetic polypeptide representing artificial human antibody VH domain
QITLKESGPTLVKPTQTLTLTCTFSGFSLSTSGVGVGWIRQPPGKALDWLALIYWDDNERYSPSLKSRLTISKDTSKNQVVLTMTDMDPVDTATYYCARLGSYGYDITEVLDYWGQGTLVSVSS

SEQ ID NO: 17646 - protein, 121 aa, Artificial Sequence
  Synthetic polypeptide representing artificial human antibody VH domain
QVQLQESGPGLVKPSQTLSLTCTVSGASISSGGYYWSWIRQHPGKGLEWIGYIYNTGTTYYNPSLKSRVTIPGDTSKNKFSLNLRYVTAADTAVYYCARGGVFGVGVFDIWGQGTVVTVSS

SEQ ID NO: 17647 - protein, 121 aa, Artificial Sequence
  Synthetic polypeptide representing artificial human antibody VH domain
QVQLVESGGGVVQPGRSLRLSCAASGFTFSTYAIHWVRQAPGKGLEWVAVISYDGSNIYYADSVKGRFTISRDNSKNTVYLQVNSLRAEDTAVYYCTRVTGGGYNNPFDYWGQGTLVTVSS

SEQ ID NO: 17648 - protein, 133 aa, Artificial Sequence
  Synthetic polypeptide representing artificial human antibody VH domain
EVQLVESGGDLVPPGGSLRLSCVGSGFTFSSSWLTWVRQRPGKGLEWVANIKEDGSETNYVDSVMGRFTISRDNPRNSVFLQMNNLRADDAAVYYCARDQYRISRGRGIYITNTFYYYGMDVWGQGTTVSVSS

SEQ ID NO: 17649 - protein, 122 aa, Artificial Sequence
  Synthetic polypeptide representing artificial human antibody VH domain
QVQLQESGPGLVKPSGTLSLTCTVSGDSISSSNWWTWVRQPPGKGLEWIAEIYQSGSTNYNSSLQSRVTISVDRSKNQVSLRLTSVTAADTAMYYCARYSPYGSGHGALDYWGQGTLVTVSS

SEQ ID NO: 17650 - protein, 129 aa, Artificial Sequence
  Synthetic polypeptide representing artificial human antibody VH domain
QVHLQQWGAGLLKPLETLSLTCAVYGESSSDHFWSWIRQPPGKGLEWIGDISHGGSTKYNPSLKSRVTISRNTSKNQFSLKLNSVTAADTAVYYCARGLKGLTMMVVVFTGAYDSFDSWGQGTVVTVSS

SEQ ID NO: 17651 - protein, 124 aa, Artificial Sequence
  Synthetic polypeptide representing artificial human antibody VH domain
QLQLQESGPGLVKPSETLSLTCTVSGGSISSSSYYWGWIRQPPGKGLEWIGSIYYSGSTYYNPSHKSRVTISVDTSKNQFSLKLSPVTAADTAVYYCARHSWGWLQLGGAFDIWGQGTMVTVSS

SEQ ID NO: 17652 - protein, 130 aa, Artificial Sequence
  Synthetic polypeptide representing artificial human antibody VH domain
QVQLQQWGAGLLKPSETLSLTCAVYGVSPTTYYYWTWIRQSPGKGLEWIGEITHSGSTNYNPSLKSRVTMSLDTSKSQFSLKLSSVTAADTAIYYCARGRSEETMIVMVVTGIDNYFDSWGQGTLVTVSS

SEQ ID NO: 17653 - protein, 125 aa, Artificial Sequence
  Synthetic polypeptide representing artificial human antibody VH domain
QVQLVESGGGVVQPGRSLRLSCAASGFTFSSYGMHWVRQAPGKGLEWVAVISYDGSNKYYADSVKGRFTISRDNSKNTLYLQMNSLRAEDTAVYYCAKDFPQYSSGWYEGGFDYWGQGTLVTVSS

SEQ ID NO: 17654 - protein, 129 aa, Artificial Sequence
  Synthetic polypeptide representing artificial human antibody VH domain
QVQLQQWGAGLLKPSETLSLTCAVYGVSPTPYYWSWIRQSPGKGLEWIGEITHGGSTNYNPSLKSRVTMSLDTSKSQFSLKLSSVTAADTAVYYCARGRYEETMIVMVVTGIDYYFDSWGQGTLVTVSS

SEQ ID NO: 17655 - protein, 121 aa, Artificial Sequence
  Synthetic polypeptide representing artificial human antibody VH domain
EVQLSESGGVLVQPGGSLRLSCAASGFIFSNYAMTWVRQAPGKGLEWVSAIGGSGENKYYAESVKGRFTISRDNSKNTLSLQMNSLTGDDTATYYCARPQEVRGGPYLAYWGQGTLVTVSS

SEQ ID NO: 17656 - protein, 123 aa, Artificial Sequence
  Synthetic polypeptide representing artificial human antibody VH domain
QVKMVESGGGVVQPARSLRLSCAASGLTFSDFALHWVRQAPGKGLEWVAFISYDGRSKYYGDSVRGRFTISRDNSKNTLYLQMNSLRAEDTAVYYCARGYYYGSGRYYNLWFWGQGTLVTVSS

SEQ ID NO: 17657 - protein, 124 aa, Artificial Sequence
  Synthetic polypeptide representing artificial human antibody VH domain
QVQLVQSGAEVKKPGASVKVSCKASGYTFTSYAMHWVRQAPGQRLEWMGWINAGNGNTKYSQKFQGRVTITRDTSASTAYMELSSLRSEDTAVYYCARGVIWFGEFPRYYFDYWGQGTLVTVSS

SEQ ID NO: 17658 - protein, 115 aa, Artificial Sequence
  Synthetic polypeptide representing artificial human antibody VH domain
EVQLVESGGGLVQPGGSLRLSCAASGFTFSSYSMNWVRQAPGKGLEWVSYISSSSSTIYYADSVKGRFTISRDNAKNSLYLQMNSLRDEDTAVYYCATLYDIFLWGQGTLVTVSS

SEQ ID NO: 17659 - protein, 121 aa, Artificial Sequence
  Synthetic polypeptide representing artificial human antibody VH domain
QVQLVQSGAEVEKPGASVKVSCKASGYSFTNYGFTWVRQAPGQGLEWMGWISAYNGKTKYAEKFQGRVTMTTDTSTSTGYMELRSLRSEDTAVYYCARGATVMVNVWFHPWGQGTLVTVSS

SEQ ID NO: 17660 - protein, 122 aa, Artificial Sequence
  Synthetic polypeptide representing artificial human antibody VH domain
EVQVVESGGGLIQPGESLRVSCAPSGFIVGDNYMSWVRQAPGKGLEWVSSIYSTGAGGRVYYADSVKGRFSISRDNSKNTLFLQMNSLRAEDTAVYYCARGVTLGNYGLDVWGLGTTVTVSS

SEQ ID NO: 17661 - protein, 128 aa, Artificial Sequence
  Synthetic polypeptide representing artificial human antibody VH domain
QVQLVQSGAEVKKPGASVKVSCKVSGYTLTELSMHWVRQAPGKGLEWMGGFDPEDGETIYAQKFQGRVTMTEDTSTDTAYMELSSLRSEDTAVYYCATGPAVAGTIGDSYYYYGMDVWGQGTTVTVSS

SEQ ID NO: 17662 - protein, 133 aa, Artificial Sequence
  Synthetic polypeptide representing artificial human antibody VH domain
EVQLVESGGDLVQPGGSLRLSCAASGFTFSSSWMTWVRQPPGRGLEWVANIKEDGSEKNYLDSVKGRFTISRDNAKNSLYLQMNSLRAEDTAVYYCARDQYRISRGRGIFITKTFFYYGMDVWGQGTTVSVSS

SEQ ID NO: 17663 - protein, 123 aa, Artificial Sequence
  Synthetic polypeptide representing artificial human antibody VH domain
EVELVESGGGLVKPGGSLRLSCAASGFNFGDHNMIWVRQAPGKGLEWVSSISGSTSYRYYADSVKGRFTISRDNAKNSLYLQMDGLKFEDTALYFCARDRGVAPIMYWHFDLWGRGTLVTVSS

SEQ ID NO: 17664 - protein, 122 aa, Artificial Sequence
  Synthetic polypeptide representing artificial human antibody VH domain
QITLKESGPTLVKPTQTLTLTCTFSGFSLSTSGVGVGWIRQPPGKALEWLALIYWDDDKRYSPSLKSRLTITKDTSKNQVVLTMTNMDPVDTATYYCAHRLAGFVRNWFDPWGQGTLVTVSS

SEQ ID NO: 17665 - protein, 129 aa, Artificial Sequence
  Synthetic polypeptide representing artificial human antibody VH domain
QVQLQQWGAGLLKPSETLSLTCAVYGVSPSNYYWSWIRQSPGKGLEWIGEITHSGSANYNPSLRSRVIMSLDTSKSQFSLKMSSVTAADTAIYYCARGRSEETMIVLVVTGIDYYFDSWGQGTLVTVSS

SEQ ID NO: 17666 - protein, 123 aa, Artificial Sequence
  Synthetic polypeptide representing artificial human antibody VH domain
QVQLQESGPGLVKPSQTLSLTCTVSSVSITSGGSYWNWIRQHPGKGLEWIGSISYSGSTSYNSSLKSRLTISENTSENQFSLKLSSVSASDTAVYYCARSENDYGGNWAFDYWGQGTLVTVSS

SEQ ID NO: 17667 - protein, 129 aa, Artificial Sequence
  Synthetic polypeptide representing artificial human antibody VH domain
QVQLQQWGAGLLKPSETLSLTCAVYGVSPSSYSWNWIRQPPGKGLEWIGEISQTGSTNYNPSLKSRVSMSLDTSKSQLSLKLSSVTAADTATYYCARGRSEETMIVLVVTGIDFYFDAWGQGTLVTVSS

SEQ ID NO: 17668 - protein, 129 aa, Artificial Sequence
  Synthetic polypeptide representing artificial human antibody VH domain
QVQLQQWGAGLLKPSETLSLTCAVYGGSFSGYYWSWIRQPPGKGLEWIGEITHSGSTNYTPSLKNRVTMSLDTSKNQFSLKLTSVTAADTAVYYCARGRSEETMIVVVITAMDYYFDYWGQGALVTVSS

SEQ ID NO: 17669 - protein, 132 aa, Artificial Sequence
  Synthetic polypeptide representing artificial human antibody VH domain
QVQLEESGPGPVKPSETLSLTCTVSGGSVSSGSNYWSWIRQPPGKGLEWIGYIHYSGNTNYNPSLKSRVSLSVDTSNNQFSLKLRSVTAADTALYYCARMVGKNHTSGLFRGYYYFYGLDVWGQGTAVTVSS

SEQ ID NO: 17670 - protein, 129 aa, Artificial Sequence
  Synthetic polypeptide representing artificial human antibody VH domain
QVQLQQWGAGLLKPSETLSLTCAVYGVSPSDYYWSWIRQSPGKGLEWIGEITHSGSANYNPSLRSRVTVSLDTSKGQFSLKMSSVTAADTAMYYCARGRSEETMIVVVVTGIDYFFDSWGQGTLVTVSS

SEQ ID NO: 17671 - protein, 121 aa, Artificial Sequence
  Synthetic polypeptide representing artificial human antibody VH domain
QVQLVESGGGVVQPGRSLRLSCGASGFTLRSYAMHWVRQAPGKGLEWVAVISYDGSNKYYADSVKGRFTITRDNSKNTLYLEMNSLRGEDTAVYHCARANGGNYYYGMDVWGQGTTVTVSS

SEQ ID NO: 17672 - protein, 129 aa, Artificial Sequence
  Synthetic polypeptide representing artificial human antibody VH domain
QVHLVESGGGVVQPGRSLKLSCGVSGFTFHEYGMHWVRQAPGKGLEWVAFMSYDETEQYLADSVKGRFAISRENSKSTLYLEMNILRTEDTAVYYCAKDSENCSGGSCDDYYYYGMDVWGQGTTVTVSS

SEQ ID NO: 17673 - protein, 120 aa, Artificial Sequence
  Synthetic polypeptide representing artificial human antibody VH domain
QVQMVQSGAEVKKPGASVRVSCEASGYTFIDYDINWVRQAPGQGLEWVGWMDPNSGLTGSAQKFQGRVTMTRNTAMHTAYMELRGLRSEDAAVYYCARGLHSNGFTFDYWGQGTLVTVSS

SEQ ID NO: 17674 - protein, 121 aa, Artificial Sequence
  Synthetic polypeptide representing artificial human antibody VH domain
QVQLVQSGAEVKKPGASVKVSCKVSGYTLTELSMHWVRQAPGKGLEWMGGFDPEDGETIYAQKFQGRVTMTEDTSTDTAYMELSSLRSEDTAVYYCATAAAAGQPNWFDPWGQGTLVTVSS

SEQ ID NO: 17675 - protein, 124 aa, Artificial Sequence
  Synthetic polypeptide representing artificial human antibody VH domain
EVQLVESGGGLVQPGRSLRLSCAASGFTFDDYAMHWVRQAPGKGLEWVSGISWNSGSIGYADSVKGRFTISRDNAKNSLYLQMNSLRAEDTALYYCATLGGELSYYYYYGMDVWGQGTTVTVSS

SEQ ID NO: 17676 - protein, 125 aa, Artificial Sequence
  Synthetic polypeptide representing artificial human antibody VH domain
QVQLVESGGGVVQPGRSLRLSCAASGFTFSSYAMHWVRQAPGKGLEWVAVISYDGSNKYYADSVKGRFTISRDNSKNTLYLQMNSLRAEDTAVYYCASTYDILTGYYHLYGMDVWGQGTTVTVSS

SEQ ID NO: 17677 - protein, 129 aa, Artificial Sequence
  Synthetic polypeptide representing artificial human antibody VH domain
QVQLQQWGAGLLKPSETLSLTCAVYGVSPSNFYWSWIRQSPGKGLEWIGEITHSGSANYNPSLRSRVTMSLDTSKSQFSLKMSSVTAADTAMYYCARGRSEETMIVVVVTGIDYYFDSWGQGTLVTVSS

SEQ ID NO: 17678 - protein, 125 aa, Artificial Sequence
  Synthetic polypeptide representing artificial human antibody VH domain
QVQLVESGGGVVQPGRSLKLSCVASGFSFNNYGMHWLRQAPGKGLEWVAVISYEGSKKYYGDALKGRFTISRDSSKNTVHLQMNRLTTEDTAVYYCAKAGPIFWFGEGKNYFDDWGQGTLVTVSS

SEQ ID NO: 17679 - protein, 120 aa, Artificial Sequence
  Synthetic polypeptide representing artificial human antibody VH domain
QVQLVESGGGVVQPGRSLRLSCAASGFTFRTYTMHWVRQAPGKGLEWVAVISDDGSNKYYADPVKGRFTISRDNSKNTLYLQMNSLRAEDTAVYYCSRGGWELLEAFDIWGQGTMVTVSS

SEQ ID NO: 17680 - protein, 119 aa, Artificial Sequence
  Synthetic polypeptide representing artificial human antibody VH domain
EVQLVQSGAEVKKPGESLKISCKGSGYSFTSYWIGWVRQMPGKGLEWMGIIYPGDSDTRYSPSFQGQVTISADKSISTAYLQWSSLKASDTAMYYCARQLPAAGILDYWGQGTLVTVSS

SEQ ID NO: 17681 - protein, 133 aa, Artificial Sequence
  Synthetic polypeptide representing artificial human antibody VH domain
EVQLVESGGDLVRPGESLRLSCVGSGFAFSSSWLTWVRQRPGKGLEWVANIKEDGSETNYVDSVKGRFTISRDNPRNSVYLQMNSLRADDAAVYYCARDQYRISRGRGIYITNTFYYYGMDVWGQGTTVSVSS

SEQ ID NO: 17682 - protein, 119 aa, Artificial Sequence
  Synthetic polypeptide representing artificial human antibody VH domain
QITLKESGPTLVKPTQTLTLTCTFSGFSISTSGVGVGWIRQPPGKALEWLALIYWDDDKRYRPSLKSRLTITKDTAKNQVVLTMTNMDPVDTGTYYCAHRRAIVGLDYWGQGTLVTVSS

SEQ ID NO: 17683 - protein, 122 aa, Artificial Sequence
  Synthetic polypeptide representing artificial human antibody VH domain
EVQLVQSGAEVKKPGESLRISCKGSGYSFTSYWISWVRQMPGKGLEWMGRIDPSDSYTNYSPSFQGHVTISADKSISTAYLQWSSLKASDTAMYYCARQWFGAYYYYGMDVWGQGTTVTVSS

SEQ ID NO: 17684 - protein, 127 aa, Artificial Sequence
  Synthetic polypeptide representing artificial human antibody VH domain
QVQLVQSGAEVKKPGASVKVSCKVSGYTLTELSMHWVRQAPGKGLEWMGGFDPEDGETIYAQKFQGRVTMTEDTSTDTAYMELSSLRSEDTAVYYCATGPATYYYGSGSPPGWFDPWGQGTLVTVSS

SEQ ID NO: 17685 - protein, 123 aa, Artificial Sequence
  Synthetic polypeptide representing artificial human antibody VH domain
EVQLVESGGGLVQPGGSLRLSCAASGFTFSSYDMHWVRQATGKGLEWVSAIGTAGDTYYPGSVKGRFTISRENAKNSLYLQMDSLRAGDTAVYYCARADYGGNFYYYYGMDVWGQGTTVTVSS

SEQ ID NO: 17686 - protein, 122 aa, Artificial Sequence
  Synthetic polypeptide representing artificial human antibody VH domain
QVQLVESGGGVVQPGRSLILSCAVSGFTFKNYPMHWVRQAPGKGLEWVAVLSSGGSNKFYADSVKGRFSISRDNSKNTLYLQLNSLKADDTAVYYCARHKGDLLRGGYFDPWGQGTLVTVSS

SEQ ID NO: 17687 - protein, 122 aa, Artificial Sequence
  Synthetic polypeptide representing artificial human antibody VH domain
EVQLVESGGGVVRPGGSLRLSCAASGFTFDDYGMSWVRQAPGKGLEWVSGINWNGGSTGYADSVKGRFTISRDNAKNSLYLQMNSLRAEDTALYYCARGVIAVAAPYYFDYWGQGTLVTVSS

SEQ ID NO: 17688 - protein, 121 aa, Artificial Sequence
  Synthetic polypeptide representing artificial human antibody VH domain
EVQLVESGGSVVRRGGSLRLSCAASGITFEDYGMNWVRQVPGKGLEWVSGINWNGGSTGYADSVKGRFTISRDNAKNSLYLEMNSLSAEDTALYFCAGGAVADTLGAFAIWGQGTMVTVSS

SEQ ID NO: 17689 - protein, 128 aa, Artificial Sequence
  Synthetic polypeptide representing artificial human antibody VH domain
EVQLVQSGAEVKKPGESLKISCKGSGYSFPTYWIAWVRQMPGKGLEWMGIIYPGDSDTRYSPSFQGQVTISADKSISTAYLQWSSLKASDTALYYCARYPQPGVGASEIYYYYGMDVWGQGTTVTVSS

SEQ ID NO: 17690 - protein, 121 aa, Artificial Sequence
  Synthetic polypeptide representing artificial human antibody VH domain
QVQLVESGGGVVQPGRSLRLSCAASGFTFSSYGMHWVRQAPGKGLEWVAVISYDGSNKYYADSVKGRFTISRDNSKNTLYLQMNSLRAEDTAVYYCAKPHSGSYYDAFDIWGQGTMVTVSS

SEQ ID NO: 17691 - protein, 120 aa, Artificial Sequence
  Synthetic polypeptide representing artificial human antibody VH domain
QVQLVESGGGVVQPGKSLRLSCVASGFTFRHYPMHWVRQAPGKGLEWVAVISDDGSNKYYADSVKGRFTIPRDNSKNTLYLQMNSLRAEDTAVYYCARGGWELLEAFDIWGQGTMVTVSS

SEQ ID NO: 17692 - protein, 124 aa, Artificial Sequence
  Synthetic polypeptide representing artificial human antibody VH domain
EVQLVQSGAEVKKPGESLKISCKGSGYSFTSYWIGWVRQMPGKGLEWMGIIYPGDSDTRYSPSFQGQVTISADKSISTAYLQWSSLKASDTAMYYCARQTPTLWFGESPWFDPWGQGTLVTVSS

SEQ ID NO: 17693 - protein, 127 aa, Artificial Sequence
  Synthetic polypeptide representing artificial human antibody VH domain
QVQLQESGPGLVKPSQTLSLTCTVSGGSISSGDYYWSWIRQHPGKGLEWIGYIYYSGNTYYNPSLKSRVTISVDTSKNQFSLKLTSVTAADTAVYYCARGTTVTTLTWDSTPFFDYWGQGTLVTVSS

SEQ ID NO: 17694 - protein, 142 aa, Artificial Sequence
  Synthetic polypeptide representing artificial human antibody VH domain
QVQLVQSGAEVKKPGASVKVSCKASGYTFTSYYMHWVRQAPGQGLEWMGIINPSGGSTSYAQKFQGRVTMTRDTSTSTVYMELSSLRSEDTAVYYCAREGRTSRTRAGYSSGWYVLTGEDPDYYYYYGMDVWGQGTTVTVSS

SEQ ID NO: 17695 - protein, 126 aa, Artificial Sequence
  Synthetic polypeptide representing artificial human antibody VH domain
EVQLLESGGGLVQPGGSLRLSCAASGFTFNSYAMSWVRQAPGKGLEWVSSITGGGGTTYYADSVKGRLSISRDNSKSTLYLQMSSLRAEDTAVYYCGKVRYGPGTYNNEGAYFDYWGQGALVTVSS

SEQ ID NO: 17696 - protein, 120 aa, Artificial Sequence
  Synthetic polypeptide representing artificial human antibody VH domain
QVQLQQWGAGLLKPSETLSLTCAVYGGSFSGYYWSWIRQPPGKGLEWIGEINHSGSTNYNPSLKSRVTISVDTSKNQFSLKVSSVTAADTAVYYCARGDGSTISYYFDYWGQGTLVTVSS

SEQ ID NO: 17697 - protein, 123 aa, Artificial Sequence
  Synthetic polypeptide representing artificial human antibody VH domain
QVQLVESGGGLVKPGGSLRLSCAASGFVFSDSYMAWIRQAPGKGLEWVSYIGRGGDITNFADSVRGRFIISRDNAKNSVVLQMNSLRAEDTAVYYCASFRPNMIRGVGPFFCWGQGILVTVSS

SEQ ID NO: 17698 - protein, 123 aa, Artificial Sequence
  Synthetic polypeptide representing artificial human antibody VH domain
EVQLVQSGAEVKKPGESLRISCKGSGYSFTSYWISWVRQMPGKGLEWMGRIDPSDSYTNYSPSFQGHVTISADKSISTAYLQWSSLKASDTAMYYCARWIQLSLLDYYGMDVWGQGTTVTVSS

SEQ ID NO: 17699 - protein, 122 aa, Artificial Sequence
  Synthetic polypeptide representing artificial human antibody VH domain
EVQLLESGGGLVQPGGSLRLSCVASGFTFGGHAMTWVRQSPGKGLEWVSTISSGGGSTYYADFVKGRFPISRDNSKNTLYLQMNGLRAEDTAVYYCAKFNGPNSYYYGLDVWGQGTTVTVSS

SEQ ID NO: 17700 - protein, 122 aa, Artificial Sequence
  Synthetic polypeptide representing artificial human antibody VH domain
EVQLVESGGGLVQPGGSLRLSCAASGFTLSTYWMHWVRQGPGKGLVWVSRIKSDGSSANYADSVKGRFTISRDNAKNTLYLQMNSLRVEDTGVYYCVRDQWIEKKRYGMDVWGQGTTVTVSS

SEQ ID NO: 17701 - protein, 126 aa, Artificial Sequence
  Synthetic polypeptide representing artificial human antibody VH domain
EVQLVESGGGLVQPGGSLRLSCAASGFTFSSYWMSWVRQAPGKGLEWVANIKQDGSEKYYVDSVKGRFTISRDNAKNSLYLQMNSLRAEDTAVYYCARDSAAAGTVHYYYYGMDVWGQGTTVTVSS

SEQ ID NO: 17702 - protein, 122 aa, Artificial Sequence
  Synthetic polypeptide representing artificial human antibody VH domain
QVQLVESGGGVVQPGRSLRFSCAASGFAFSNYAMHWVRQAPGKGLEWVALISDDGSNKYYADSVKGRFTISRDNSKNTLYLQMNSLRAEDTAVYYCARGGNGGDLLRYFDYWGQGTLVTVSS

SEQ ID NO: 17703 - protein, 121 aa, Artificial Sequence
  Synthetic polypeptide representing artificial human antibody VH domain
EVQLVESGGGLVKPGGSLRLSCAASGFTFNTYSMSWVRQAPGKGLEWVSSIDFTSTYIYYADSLNGRFTISRDNAKNSLFLRMNSLRAEDSAVYYCARVRGSGTFYAMDVWGQGTTVTVSS

SEQ ID NO: 17704 - protein, 129 aa, Artificial Sequence
  Synthetic polypeptide representing artificial human antibody VH domain
QVHLQQWGAGLLKPLETLSLTCAVYGESSSDHYWSWIRQPPGKGLEWIGEISHGGSTKYNPSLKSRVTISRDTSKNQFSLKLKSVTAADTAVYYCARGLKGLTMMVVVFTGAYDAFDIWGQGTMVTVSS

SEQ ID NO: 17705 - protein, 120 aa, Artificial Sequence
  Synthetic polypeptide representing artificial human antibody VH domain
EVQLVESGGGLVQPGRSLRLSCAASGFTFDDYAMHWVRQAPGKGLEWVSGISWNSGSIGYADSVKGRFTISRDNAKNSLYLQMNSLRAEDTALYYCACPIGGWYANFDYWGQGTLVTVSS

SEQ ID NO: 17706 - protein, 116 aa, Artificial Sequence
  Synthetic polypeptide representing artificial human antibody VH domain
QVQLVESGGGWVKPGGSLRLSCTASGFTFSDYYMTWIRQAPGKGLECLSYISGSSGDRNYADSVKGRFTISRDNAKNSLYLQLNSLRAEDTAVYYCALNARIPGYWGQGTLVTVSS

SEQ ID NO: 17707 - protein, 123 aa, Artificial Sequence
  Synthetic polypeptide representing artificial human antibody VH domain
QVQLQESGPGLVKPSQTLSLTCTVSGGSISSGDYYWSWIRQPPGKGLEWIGYIYYSGSTYYNPSLKSRVTISVDTSKNQFSLKLSSVTAADTAVYYCARETGSMVQGYYFDYWGQGTLVTVSS

SEQ ID NO: 17708 - protein, 117 aa, Artificial Sequence
  Synthetic polypeptide representing artificial human antibody VH domain
EVQLVESGGGLIQPGRSLRLSCAASGFTFDDHAMHWVRQTPGKGLEWVSGITWNGNYIAYADSVRGRFTISRDNAKNFLYLQMNSLRGEDTAFYYCAKDFELDGGNWGQGTLVTVSS

SEQ ID NO: 17709 - protein, 128 aa, Artificial Sequence
  Synthetic polypeptide representing artificial human antibody VH domain
QVQLVQSGSELKKPGASVKVSCKASGYTFTSYAMNWVRQAPGQGLEWMGWINTNTGNPTYAQGFTGRFVFSLDTSVSTAYLQISSLKAEDTAVYYCARDLLRYFDWSIFYYYYGMDVWGQGTTVTVSS

SEQ ID NO: 17710 - protein, 132 aa, Artificial Sequence
  Synthetic polypeptide representing artificial human antibody VH domain
QVQLVQSGAEVKKPGSSVKVSCKASGGTFSSYAISWVRQAPGQGLEWMGGIIPIFGTANYAQKFQGRVTITADESTSTAYMELSSLRSEDTAVYYCARMGWKKGGIAAADWGDYYYYGMDVWGQGTTVTVSS

SEQ ID NO: 17711 - protein, 121 aa, Artificial Sequence
  Synthetic polypeptide representing artificial human antibody VH domain
EVQLLESGGGLVQPGGSLRLSCAASGFTFSTYTMSWVRQAPGKGLEWVSSIIGSDGSTHYADSVKGRFTISRDNSKNTLYVQMNSLRAEDTAVYYCAKDFRPDGRWTIDYWGQGTLGTVSS

SEQ ID NO: 17712 - protein, 118 aa, Artificial Sequence
  Synthetic polypeptide representing artificial human antibody VH domain
QVHLVQSVAEVKKPGASVRVSCKISGYRLTEVALHWVRQAPGQGLEWMGSFDPQDAEPIYAQKLQGRVTMTEDTSSDTAYMELRRLSSDDTAVYYCATSPWDVTLEYWGQGSLVTVSS

SEQ ID NO: 17713 - protein, 124 aa, Artificial Sequence
  Synthetic polypeptide representing artificial human antibody VH domain
QVQLQESGPGLVKPSQTLSLTCTVSGGSITGYYWSWIRQPPGKGLEWVGHVHDSGSTNYNPSLKSRVTISVDTSENQFSLKLSAVTAADTAIYYCAREMPRIQLWLRGGYFDYWGQGTLATVSS

SEQ ID NO: 17714 - protein, 120 aa, Artificial Sequence
  Synthetic polypeptide representing artificial human antibody VH domain
QVHLQESGPGLVKPSETLSLTCIVSGGSLSPYYWSWVRQPPGKGLEWVGYIHYNANTNYNPSLMSRVTMSVDTSKSQFSLKLNSVTAADTAVYFCARSGGGWLQFYFDYWGQGTLVTVSS

SEQ ID NO: 17715 - protein, 124 aa, Artificial Sequence
  Synthetic polypeptide representing artificial human antibody VH domain
QVQLQESGPGLVKPSETLSLTCTVSGGSVSSGSYYWSWIRQPPGKGLEWIGYIYYSGSTNYNPSLKSRVTMSVDTSKNQFSLKLTSVTAADAAVYYCARVEMATIPNRYYFDYWGQGTLVTVSS

SEQ ID NO: 17716 - protein, 127 aa, Artificial Sequence
  Synthetic polypeptide representing artificial human antibody VH domain
QVQLQESGPGLVKPSQTLSLTCTVSDGFISNDDYSWTWIRQPPGKGLEWIGHIYYSGSAYYNPSLKSRYTISIDTSRNQFSLKLTSVTDADTAVFYCARGVFCSGNSCYSSPWFDPWGQGTLVTASS

SEQ ID NO: 17717 - protein, 130 aa, Artificial Sequence
  Synthetic polypeptide representing artificial human antibody VH domain
QVQLVQSGAEVEKPGASVKVSCQASGYIFTDFALNWVRQAPGQGLEWMGWINAASGHTEYSRKFQGRVTISRDTSAKTTYMELSGLTSEDTAVYFCARDSGVRPSGYGVPNDYYFGMDVWGQGTTVTVSS

SEQ ID NO: 17718 - protein, 120 aa, Artificial Sequence
  Synthetic polypeptide representing artificial human antibody VH domain
EVQLVESGGGVVRPGGSLRLSCVASGFIFGDFDMSWVRQAPGKGLEWVSGINLNGGSTGYADSVKGRFTISRDNAKNSLYLQMTSLRAEDTALYYCARDFFHGDPVLDYWGQGTLVTVSS

SEQ ID NO: 17719 - protein, 126 aa, Artificial Sequence
  Synthetic polypeptide representing artificial human antibody VH domain
QVQLVQSGAEVKKPGASVKVSCKASGYTFTGYYMHWVRQAPGQGLEWMGWINPNSGGTNYAQKFQGRVTMTRDTSISTAYMELSRLRSDDTAVYYCARVVWYCSSTSCFHDAFDIWGQGTMVTVSS

SEQ ID NO: 17720 - protein, 122 aa, Artificial Sequence
  Synthetic polypeptide representing artificial human antibody VH domain
EVQLVESGGGLVKPGGSLRLSCAASGSTLSNAWMSWVRQAPGKGLEWVARIKSNYDGGATDYAAALKGRFTISRDESKNTLFLQMNSLKIEDTAVYYCTTDPPIRRYAMDVWGQGTTVTVSS

SEQ ID NO: 17721 - protein, 132 aa, Artificial Sequence
  Synthetic polypeptide representing artificial human antibody VH domain
QVQLQQSGPGLVKPSQTLSLTCAISGDSVSSNSAAWNWIRQSPSRGLEWLGRTYYRSKWYNDYAVSVKSRITINPDTSKNQFSLQLNSVTPEDTAVYYCARGVSDFTMIVVVITGFSYFDYWGQGTLVTVSS

SEQ ID NO: 17722 - protein, 120 aa, Artificial Sequence
  Synthetic polypeptide representing artificial human antibody VH domain
EVQLVESGGTMLRPGESLRLSCAASGFIFGDYDMAWVRQAPGKGLEWVCGINYSGGSSTYADSVKGRFTISRDNVKNSLYLQLSGLRAEDTALYFCARDFFHGDPVFDFWGQGTLVTVSS

SEQ ID NO: 17723 - protein, 120 aa, Artificial Sequence
  Synthetic polypeptide representing artificial human antibody VH domain
QVQRLQSGTGVKRPGSSVRFSCQVTGGTLSNSGINWVRQAPGQGLEWMGKIVPLVGRTYYAQQFQGRVTMTADDSSETIVYMELTRLSSEDTALYFCAKSPSVNYVFEIWTQGTMLTVTS

SEQ ID NO: 17724 - protein, 130 aa, Artificial Sequence
  Synthetic polypeptide representing artificial human antibody VH domain
QVQLVQSGAEVKKPGASVKVSCKASGYTFTSYGISWVRQAPGQGLEWMGWISAYNGNTNYAQKLQGRVTMTTDTSTSTAYMELRSLRSDDTAVYYCARVGRLGPLYSSSWYGDGNWFDPWGQGTLVTVSS

SEQ ID NO: 17725 - protein, 129 aa, Artificial Sequence
  Synthetic polypeptide representing artificial human antibody VH domain
QVQLQQWGAGLLKPSETLSLTCAVYGASLSGNDWSWVRQSPGRGLEWIGEINQSGNTNYNPSLKSRVSISSDTSKNQFSLRLNSVTAADTAVYFCARGRGDITMFLVAITSATYYFDYWGRGTLATVSS

SEQ ID NO: 17726 - protein, 126 aa, Artificial Sequence
  Synthetic polypeptide representing artificial human antibody VH domain
QVLLVQSGAEVRKPGASVRVSCKASGYTFTGYYIHWLRQAPGQGPQWMGWMNPRSGGTHYGQKFRGRITLTRDTSIGTAYMELTRLTSDDTAIYYCARVPIAGTTWSVRGSQFDFWGQGTLVTVSS

SEQ ID NO: 17727 - protein, 122 aa, Artificial Sequence
  Synthetic polypeptide representing artificial human antibody VH domain
QVQLVESGGGVVQPGRSLRLSCAASGFTFSSYGMHWVRQAPGKGLEWVAVIWYDGSNKYYADSVKGRFTISRDNSKNTLYLQMNSLRAEDTAVYYCASARNYYDSSGVFDYWGQGTLVTVSS

SEQ ID NO: 17728 - protein, 116 aa, Artificial Sequence
  Synthetic polypeptide representing artificial human antibody VH domain
EVQLVESGGGLVQPGGSLRLSCAASGFTFSDYWMSWVRQAPGRGLQWVANIKEDGSEKYYVDSVKGRFTISRDNAKNSLYLQMNSLRAEDTAVYYCATATLYLQHWGQGTLVTVSS

SEQ ID NO: 17729 - protein, 121 aa, Artificial Sequence
  Synthetic polypeptide representing artificial human antibody VH domain
QVHLQESGPGLVKPSETLSLTCTVSGGSISGHYWSWIRKPAGKGLEWIGRMYISGSSNHNPSLMSRVTMSGDTSKNEFFLKLRSVTAADTAIYYCARGSDIEYSSALYAYWGQGTLVTVSS

SEQ ID NO: 17730 - protein, 113 aa, Artificial Sequence
  Synthetic polypeptide representing artificial human antibody VH domain
QVQLVQSGAEVKKPGASVRVSCRTSGYVFTNYAMHWVRQAPGQRLEWMGWINPNNGNTKYSQNFQGRVTIARDTSANTAYMDLIDLRPEDTAIYYCARNHDYWGQGTLVTVSS

SEQ ID NO: 17731 - protein, 124 aa, Artificial Sequence
  Synthetic polypeptide representing artificial human antibody VH domain
QVQLVQSGAEVKKPGSSVKVSCKASGGTFSSYAISWVRQAPGQGLEWMGRIIPILGIANYAQKFQGRVTITADKSTSTAYMELSSLRSEDTAVYYCAATTLSDSSGYSLPCDYWGQGTLVTVSS

SEQ ID NO: 17732 - protein, 132 aa, Artificial Sequence
  Synthetic polypeptide representing artificial human antibody VH domain
QVQLQQWGAGLLKPSETLSLTCAVYGGSFTDYYWSWIRQPPGKGLEWIGEINHSGNTDFNPSLKTRVTISVDTSKNQFSLKLTSVTAADTAVYYCARVRAVVVPAPVLGLGPYYYSYYMDVWGKGTTVTVSS

SEQ ID NO: 17733 - protein, 112 aa, Artificial Sequence
  Synthetic polypeptide representing artificial human antibody VH domain
QVQLVESGGGVVQPGRSLRLSCAASGFTFNVYGIHWVRQAPGKGLEWVALISGDGYNQFYADSVKGRFTVSRDNSRNTVYLQVSSLRAEDTAMYYCTRLDYWGQGTLVTVSS

SEQ ID NO: 17734 - protein, 129 aa, Artificial Sequence
  Synthetic polypeptide representing artificial human antibody VH domain
EVQLMESGGGLVQPGGSLRLSCAASGFTFSGYVMGWVRQAPGKGLEWLSSISASGTSTFYADSVKGRVTISRDNSRNILYLEMDSLRPEDTAMYYCVNPPWADYDYIFRTDLYTGFQHWGQGTLVTVSS

SEQ ID NO: 17735 - protein, 114 aa, Artificial Sequence
  Synthetic polypeptide representing artificial human antibody VH domain
EVQLLESGGTLVRPGGSLRLSCAASGFTFSNFAMSWVRQAPGEGLKWVSTVSGSGGSTYYADSVKGRFTISRDNSKNTLYLQMNSLRAEDTAVYFCAKRDTTGWGQGTLVTVSS

SEQ ID NO: 17736 - protein, 122 aa, Artificial Sequence
  Synthetic polypeptide representing artificial human antibody VH domain
EVQLVESGGGLVQPGGSLRLSCAVSGFTFNNYWMSWVRQAPGKGLEWVANIKRDGGEKNYVDSVKGRFTISRDNAKNLVFLQINSLRTEDTGVYYCAREGIIAEAGFYFDSWGQGTLVTVSS

SEQ ID NO: 17737 - protein, 120 aa, Artificial Sequence
  Synthetic polypeptide representing artificial human antibody VH domain
QVQLQESGPGLLKPSETLSLTCTVSGGSISSSYWNWIRQPAGKGLEWIGRIYTSGTTNYNPSLKNRVTMSVDTSKNQFSLRLTSVTAADTAVYYCARDLGWEQANWFDPWGQGTLVTVSS

SEQ ID NO: 17738 - protein, 120 aa, Artificial Sequence
  Synthetic polypeptide representing artificial human antibody VH domain
EVQLVESGGGLVQPGGSLRLSCAASGFTFSTYWMSWVRQAPEKGLEWVANIKYDGSEKYYVDSVKGRFTISRDNAKNSLYLQMNSLRVEDTAVYYCAKGDRGDGGYDSRWGQGTLVTVSS

SEQ ID NO: 17739 - protein, 124 aa, Artificial Sequence
  Synthetic polypeptide representing artificial human antibody VH domain
EVHLVESGGGLVQPGGSLRVSCAASGFTFSNYEMNWVRQAPGKGLEWVAYIDRSGPSIFYADSVKGRFTVSRDNANNLLYLHMNSLRAEDTAIYHCTRENRDPPGSGPYYFDYWSQGALVAVSS

SEQ ID NO: 17740 - protein, 125 aa, Artificial Sequence
  Synthetic polypeptide representing artificial human antibody VH domain
QVQVQESGPGLVKPSQTLSLTCTVSGGSISSGGYYWSWIRQHPGKGLEWIGYIYYSGSTYYNPSLKSRVIISVDTSKNQFSLKLSSVTAADTAVYYCARLDYYDSSGHCYYFDYWGQGTLVTVSS

SEQ ID NO: 17741 - protein, 120 aa, Artificial Sequence
  Synthetic polypeptide representing artificial human antibody VH domain
QVQLVESGGGLVKPGGSLRLSCAASGFTFSDYYMTWIRQAPGKGLEWVSYISGSGGTIYYSESVKGRLTISRDNAKNSLYLQMNSLRAEDTAVYYCARGNNGYNYRFDIWGQGTMVTVSS

SEQ ID NO: 17742 - protein, 126 aa, Artificial Sequence
  Synthetic polypeptide representing artificial human antibody VH domain
QLQLQESGPGLVKPSETLSLTCTVSGGSISSSSYYWGWIRQPPGKGLEWIGSIYYSGSTYYNPSLKSRVTISVDTSKNQFSLKLSSVTAADTAVYYCARSRKDYVWGSYRYLFDPWGQGTLVTVSS

SEQ ID NO: 17743 - protein, 129 aa, Artificial Sequence
  Synthetic polypeptide representing artificial human antibody VH domain
EVQLLESGGGLVQPGGSLRLSCEASGFTFSSYAMSWVRQAPGKGLEWIAVIGGSGSATLYADSVKGRFTISRDKTKQMLYLQMDSLRAEDTAVYYCAKDGDPDYVWGKYRYQTYYFDYWGQGTLVTVSS

SEQ ID NO: 17744 - protein, 120 aa, Artificial Sequence
  Synthetic polypeptide representing artificial human antibody VH domain
EVQLMESGGGLVQPGGSLRLSCAGSGFTFNIHAMTWVRQAPGKGLEWVSTISGTGSVTKYADSVKGRFTISRDNSKNTLYLQMNSLRADDTAVYYCATSVLGDYSRFDYWGQGTRLTVSS

SEQ ID NO: 17745 - protein, 117 aa, Artificial Sequence
  Synthetic polypeptide representing artificial human antibody VH domain
EVQLVESGGGLVQPGGSLRLSCAASGFTFSSYWMTWVRQSPGKGLEWVANIKQDGSAKHYVDSVKGRFTISRDNAKNSLYLQMDSLRAEDTAVYYCATSYGDYDDYWGQGTLVTVSS

SEQ ID NO: 17746 - protein, 129 aa, Artificial Sequence
  Synthetic polypeptide representing artificial human antibody VH domain
QVQLVQSGAEVKKPGASVKVSCKASGYTFTSYYMHWVRQAPGQGLEWMGIINPSGGSTSYAQKFQGRVTMTRDTSTSTVYMELSSLRSEDTAVYYCARDFNWFGELHTTYYYYYYMDVWGKGTTVTVSS

SEQ ID NO: 17747 - protein, 124 aa, Artificial Sequence
  Synthetic polypeptide representing artificial human antibody VH domain
QVQLVESGGGLVKPGRSLRLFCAASGFTVSDYYMSWIRQAPGKGLEWVSYMSSTGSPIYYADSVKGRFTVSRDNAKNTLYLQMNSLRAEDTAVYYCARDLYYYGSGSYCAFDLWGQGTMVTVSS

SEQ ID NO: 17748 - protein, 125 aa, Artificial Sequence
  Synthetic polypeptide representing artificial human antibody VH domain
QVHLAESGGTVVQPGRSLRLSCVASGFNFNNYGMNWVRQAPGKGLEWVAVISYEGSIKYYADSLRGRFTISRDSSKNTLYLQMNSLIPEDTAVYYCARRRELLWLGEPHCGMDVWGQGTTVTVSS

SEQ ID NO: 17749 - protein, 125 aa, Artificial Sequence
  Synthetic polypeptide representing artificial human antibody VH domain
QVQLVESGGGVVQPGRSLRLSCAASGFTFSNYGFHWVRQAPGKGLEWVALIWFDGSNRYYADSVKGRFTISRDNSENTLFLQMNSLRAEDTAVYYCARDKKPYFDILTGSYFDSWGQGTLVTVSS

SEQ ID NO: 17750 - protein, 129 aa, Artificial Sequence
  Synthetic polypeptide representing artificial human antibody VH domain
QVQLRQWGAGLLKPPETLSLTCAVYGGSLSGYFWTWIRQPPGKGLEWIGEINHVGSTSYNPSLKSRVIISIDTSKNQFSLKMRSVTAADTAVYFCAREDTMLRRIGWFASEKINRFDPWGQGTLVTVSS

SEQ ID NO: 17751 - protein, 117 aa, Artificial Sequence
  Synthetic polypeptide representing artificial human antibody VH domain
QVQLVESGGGVVQPGRSLRLSCAASGFTFSSYGMHWVRQAPGKGLEWVALISYDGSNKYYADSVKGRFTISRDNSKNTVYLQMNSLRAEDTAVYYCARFSGRAFDIWGQGTMVTVSS

SEQ ID NO: 17752 - protein, 126 aa, Artificial Sequence
  Synthetic polypeptide representing artificial human antibody VH domain
QVQLVQSGAEVKKPGASVKVSCKASGYTFTSYAMHWVRQAPGQRLEWMGWINAGNGNTKYSQKFQGRVTITRDTSASTAYMELSSLRSEDTAVYYCARGGSSGLYCSGGSCYFDYWGQGTLVTVSS

SEQ ID NO: 17753 - protein, 120 aa, Artificial Sequence
  Synthetic polypeptide representing artificial human antibody VH domain
EVQLVESGGGLVQPGGSLRLSCAASGFTFTTYFMSWVRQAPGKGLEWVANIKHDGSETYYVDSVKGRFTVSRDNAKNSLYLQMNSLRAEDTAVYYCAKDGGVGGHPLDSWGQGTLVTVSS

SEQ ID NO: 17754 - protein, 119 aa, Artificial Sequence
  Synthetic polypeptide representing artificial human antibody VH domain
EVQLVESGGGLVQPGTSLRLSCAVSGFAFDNYAMHWVRQAPGKGPEWVSGITWDSGVLDYADSVKGRFTISRDNAKNSLYLQMDSLRVEDTAFYYCAKEGYRLGYLVYWGLGTLVTVSS

SEQ ID NO: 17755 - protein, 121 aa, Artificial Sequence
  Synthetic polypeptide representing artificial human antibody VH domain
QVHLVESGGGVVQPGTSLRLSCPASGFFFSDYGMHWVRQAPGKGLEWVAGISYDGSDKDYIDSVKGRFSIARDNSKSTVYLQMNSLRGEDTAVYYCAKSTNLYRSGGFDYWGQGTLVTVSS

SEQ ID NO: 17756 - protein, 121 aa, Artificial Sequence
  Synthetic polypeptide representing artificial human antibody VH domain
QVQLVESGGGLVKPGGSLRLSCAASGFTFSDYYMSWIRQAPGKGLEWVSYISSSGSTIYYADSVKGRFTISRDNAKNSLYLQMNSLRAEDTAVYYCARDRGWLQPWYFDLWGRGTLVTVSS

SEQ ID NO: 17757 - protein, 117 aa, Artificial Sequence
  Synthetic polypeptide representing artificial human antibody VH domain
QVHLQESGPGLVKPSETLSLTCTVSGGSISSYFWSWIRQPPGKGLEWIGYIYHSGTTEYNPSLKSRVTITVDTSKNQFSVRLNSVTAADTAMYYCASGMISDAFDVWGQGTMVTVSS

SEQ ID NO: 17758 - protein, 122 aa, Artificial Sequence
  Synthetic polypeptide representing artificial human antibody VH domain
QVQLVESGGGVVQPGRSLRVSCAASGFTFSSYAMQWVRQAPGKGLEWVTFISYDGSNKYYADSVKGRFTISRDNSKNTLYLQMNSLRPEDTAVYYCAREWGGRYTGPFFNYWGQGTPVTVSS

SEQ ID NO: 17759 - protein, 122 aa, Artificial Sequence
  Synthetic polypeptide representing artificial human antibody VH domain
QVQLVESGGGVVQPGRSLRLSCAASGFTFSSYGMHWVRQAPGKGLEWVAVISYDGSSKYYADSVKGRFTISRDNSKNTLYLQMNSLRAEDTAVYYCAREGQWELLGRAFDIWGQGTMVTVSS

SEQ ID NO: 17760 - protein, 125 aa, Artificial Sequence
  Synthetic polypeptide representing artificial human antibody VH domain
QVQMQQSGPGLVKPSQTLSLTCAISGDSVSSDSAAWSWIRQSPSRGLEWLGRTYYRSKWYNDYALFVKSRITIRPDTSKNQFSLELNSVSSEDTAVYYCVRDSPRGGYGAYFDYWGQGTLVTVSS

SEQ ID NO: 17761 - protein, 125 aa, Artificial Sequence
  Synthetic polypeptide representing artificial human antibody VH domain
QVQLQESGPGLVKPSETLSLTCTVSGGSISSYYWSWIRQPPGKGLEWIGYIYYSGSTNYNPSLKSRVTISVDTSKNQFSLKLSSVTAADTAVYYCARVFGSTIFGVVIIQAFDIWGQGTMVTVSS

SEQ ID NO: 17762 - protein, 122 aa, Artificial Sequence
  Synthetic polypeptide representing artificial human antibody VH domain
QVQLVQSGAEVKKPGASVKISCETSGYTSSNYAVHWLRQAPGQRPEWMAWIKVGDGDTRLSEKFLGRLTLTRATSATTTYMELGSLTSEDTAVYYCARVALTGYYTGVLDFWGQGTLVTVSS

SEQ ID NO: 17763 - protein, 125 aa, Artificial Sequence
  Synthetic polypeptide representing artificial human antibody VH domain
EVQLVESGGGLVQPGRSLRLSCAASGFTFDDYAMHWVRQAPGKGLEWVSGISWNSGSIGYADSVKGRFTISRDNAKNSLYLQMNSLRAEDTALYYCAKDSHYDSSGYYQNAFDIWGQGTMVTVSS

SEQ ID NO: 17764 - protein, 121 aa, Artificial Sequence
  Synthetic polypeptide representing artificial human antibody VH domain
QLHLQESGPGLVKTSETLSLACNMSGDLFSSTAFYYNWVRQSPGKGLEWIGAFHSSGVSFYNPSLKNRITMSVDASTNQFFLQMAAVTATDTAVYYCSRGGSYMHWHLEVWGRGSLVTVST

SEQ ID NO: 17765 - protein, 121 aa, Artificial Sequence
  Synthetic polypeptide representing artificial human antibody VH domain
QVQLQESGPGLVKPAGTLSLTCGVSGDPLTLGIFWSWVRQSPGKGLEWIGEIYHTGITSYNTSLQSRVTISVDTSRNQFSLRLTSVTAADTAIYYCARGTALPGLYYFDHWGQGTLVTVSS

SEQ ID NO: 17766 - protein, 124 aa, Artificial Sequence
  Synthetic polypeptide representing artificial human antibody VH domain
QVQLQESGPGLVKPSQTLSLTCSVSGASITSSGYYWSWLRQLPGKGLEWIGYIYSSGSTHYNPSLESRVTVSADMSKNQFSLNLSSVTAADTAVYYCAREWAKFYFPSPGPINWGQGTLVTVSS

SEQ ID NO: 17767 - protein, 118 aa, Artificial Sequence
  Synthetic polypeptide representing artificial human antibody VH domain
EVQLVESGGGLVQPGGSLRLSCAASGFTFSTYALNWVRQAPGKGLEWISYISYSGSTIYYADSVKGRFTISRDNAKNSLYLEMNSLRAEDTAVYYCARGWVRYNFDFWGQGTLVTVSS

SEQ ID NO: 17768 - protein, 127 aa, Artificial Sequence
  Synthetic polypeptide representing artificial human antibody VH domain
EVKLVESGGDLVKPGGSLRLSCAASGFTFSYAWMSWVRQAPGKGLEWVGRIKSKTDGETTDYAAPVQGRFTISRDDSKNTLFLQMNSLKTEDTAVYYCTTGLGNITSGGFIALFDYWGQGTLATVSS

SEQ ID NO: 17769 - protein, 130 aa, Artificial Sequence
  Synthetic polypeptide representing artificial human antibody VH domain
QVQLQQWGAGLLKPSETLSLTCAVYGGSFSDYYWSWVRQSPGRGLEWIGEINHSGSTNYNPSLKSRVTISVDTSKNQFSLSLRSVTAADTAVYYCAREAPAWAFVVLVGVPYHYYSMDVWGKGTTVTVSS

SEQ ID NO: 17770 - protein, 118 aa, Artificial Sequence
  Synthetic polypeptide representing artificial human antibody VH domain
EVQLVQSGGEVKKSGESLTISCQGSGYTFTDYWIAWVRQMPGKGLEWMGAIFPHDSDVKHTPSFQGQVTISADKSISTAYLQWTSLKASDTAMYFCARVNGAIDLDLWGQGTLVTVSS

SEQ ID NO: 17771 - protein, 129 aa, Artificial Sequence
  Synthetic polypeptide representing artificial human antibody VH domain
EVQLMESGGGLVQPGGSLRLSCAASGFTFSGYVMGWVRQAPGKGLEWLSSISASGTSTFYADSVKGRVTISRDNSRNILYLEMDSLRPEDTAMYYCVNPLWADYDYIFRTDLYTGFQHWGQGTLVTVSS

SEQ ID NO: 17772 - protein, 116 aa, Artificial Sequence
  Synthetic polypeptide representing artificial human antibody VH domain
QVQLVQPGVEVKKPGASVKVSCKASGYTFASYGISWVRQAPGQGLEWMGWISTYTGNTNYAQKLQGRVTMTTDISTSTAYMELRNLRFDDMAMYYCARGLTGNDYWGQGTLVTVSS

SEQ ID NO: 17773 - protein, 118 aa, Artificial Sequence
  Synthetic polypeptide representing artificial human antibody VH domain
QVQLQESGPGLVKPSETLSLTCSVSGASVLTYYWTWIRQPPGKGLEWIGYIYYSGYTNYNPSLKSRVTMSMDTSKTHFSLKLTSVTAADTAVYFCALLASPAYYMAAWGKGTTVTVSS

SEQ ID NO: 17774 - protein, 125 aa, Artificial Sequence
  Synthetic polypeptide representing artificial human antibody VH domain
QVDLVESGGGVVQPGRSLTLSCEASGFIFRNYDMHWVRQAPGKGLEWVSVIYYDGSDQWYAGSVRGRFAVFRDNSKKTLFLQMNDLRFEDTAVYYCARGTRDSWERKLNMAVDYWGRGTQVTVSS

SEQ ID NO: 17775 - protein, 118 aa, Artificial Sequence
  Synthetic polypeptide representing artificial human antibody VH domain
EVQLVESGGVVVQPGGSLRLSCAASGFTFDDYTMHWVRQAPGKGLEWVSLISWDGGSTYYADSVKGRFTISRDNSKNSLYLQMNSLRTEDTALYYCATGTTDDAFDYWGQGTLVTVSS

SEQ ID NO: 17776 - protein, 132 aa, Artificial Sequence
  Synthetic polypeptide representing artificial human antibody VH domain
QVQLVESGGGVVQPGRSLRLSCAASGFTFSSYAMHWVRQAPGKGLEWVAVISYDGSNKYYADSVKGRFTISRDNSKNTLYLQMNSLRAEDTAVYYCARGLDYDFWFSGPMTNYYYYYGMDVWGQGTTVTVSS

SEQ ID NO: 17777 - protein, 126 aa, Artificial Sequence
  Synthetic polypeptide representing artificial human antibody VH domain
EVQLVQSGAEVKKPGESLKISCKGSGYSFTSYWIGWVRQMPGKGLEWMGIIYPGDSDTRYSPSFQGQVTISADKSISTAYLQWSSLKASDTAMYYCARQSYRYSSGWYYYYGMDVWGQGTTVTVSS

SEQ ID NO: 17778 - protein, 125 aa, Artificial Sequence
  Synthetic polypeptide representing artificial human antibody VH domain
QLQLQESGPGLVKPSETLSLTCIVSGGSISSSTYYWGWIRQPPGKGLEWIGSIYYSGSTFDNPSLKSRVTMSVDTSKNQLSLKLSSVTAADTAVYYCARHGDFWSGYYPGAFDIWGQGTMVTVSS

SEQ ID NO: 17779 - protein, 123 aa, Artificial Sequence
  Synthetic polypeptide representing artificial human antibody VH domain
QVQLVQSGAEVKKPGASVKVSCKASGYTFTSYAMHWVRQAPGQRLEWMGGINVGNGYTKYSQKFQGRVTITRDTSASTAHMELSSLRSEDTAVYYCARSPPIAVAGTTWFDPWGQGTLVTVSS

SEQ ID NO: 17780 - protein, 125 aa, Artificial Sequence
  Synthetic polypeptide representing artificial human antibody VH domain
EVELVESGGVLVQPGRSLRLSCRGSGFTFRDYGLAWVRQAPTKGLEWVCLISNIIYGATTQYAASVRGRFTISRDDSKSIAYLQMTSLKPEDTGVYFCTRGDRRGYLSRHYMGVWGKGTTVTVSS

SEQ ID NO: 17781 - protein, 130 aa, Artificial Sequence
  Synthetic polypeptide representing artificial human antibody VH domain
QVQLVQSGPELKKPGASVMVSCKASGYDFTKFVLNWVRVRQAPGQGPEWMGWINTDTGDPTYAQDFPDRFVFSLDTYVSTAYLEIRDLEPEDTAVYYCARVPADRLVLLPSAVQTYFDYWGQGTLVSVSP

SEQ ID NO: 17782 - protein, 118 aa, Artificial Sequence
  Synthetic polypeptide representing artificial human antibody VH domain
EVQLVESGGNVVQPGGSLRLSCAASGFTFDYHTMHWVRQAPGKGLEWVGLVDWNGDNTVYSDSVRGRFIISRDNSKNSLYLQMNSLKTEDTAFYYCARDSGGRPFDYFGQGTLVTVSS

SEQ ID NO: 17783 - protein, 127 aa, Artificial Sequence
  Synthetic polypeptide representing artificial human antibody VH domain
QITLRESGPTLVDPTQTLTLTCTFSGFSLKTNGVAVGWIRRPPGKALEWLALISWDDDKRYSPSLNTRVTITKYTSENRVVLTMTNLAPMDTATYYCAHSLRRATWSEASYYYMDVWGTGTKVTVSS

SEQ ID NO: 17784 - protein, 122 aa, Artificial Sequence
  Synthetic polypeptide representing artificial human antibody VH domain
EVQLLESGGGLVQPGGSLRLSCAASGFTFSNYAMNWVRQAPGKGLEWVSVISGSGGSTQYADSVKGRFTISRDNSKSTLYLQMNSLRAEDTAVYYCAKGDDSGTYYYYMDVWGKGTTVTVSS

SEQ ID NO: 17785 - protein, 128 aa, Artificial Sequence
  Synthetic polypeptide representing artificial human antibody VH domain
EVHLVESGGAVIQPGGSLRLSCAASGFIFEDYVMHWVRQFPAKGLEWVSLISWDGHQTYYADAVKGRFIISRDNSKKSLYLQMNNLGPEDTALYYCAKDVEDRYYDFSSGSTRLPGSWGQGTPVTVSS

SEQ ID NO: 17786 - protein, 121 aa, Artificial Sequence
  Synthetic polypeptide representing artificial human antibody VH domain
QVQLQESGPGLVKPSETLSLTCTVSGGSISSYYWSWIRQPPGKGLEWIGYIYYSGSTNYNPSLKSRVTISVDTSKNQFSLKLSSVTAADTAVYYCARGSYYDFRDYYMDVWGKGTTVTVSS

SEQ ID NO: 17787 - protein, 124 aa, Artificial Sequence
  Synthetic polypeptide representing artificial human antibody VH domain
QLQLQESGPGLVKPSETLSLTCTVSGGSISSSSYYWGWIRQPPGKGLEWIGSIYYSGSTYYNPSLKSRVTISVDTSKNQFSLKLSSVTAADTAVYYCARPYYDSSGYHDAFDIWGQGTMVTVSS

SEQ ID NO: 17788 - protein, 127 aa, Artificial Sequence
  Synthetic polypeptide representing artificial human antibody VH domain
QVQLVESGGGVVQPGRSLRLSCAASGFTFSSYGMHWVRQAPGKGLEWVAVIWYDGSNKYYADSVKGRFTISRDNSKNTLYLQMNSLRAEDTAVYYCARGPDILTGYYNYYYYGMDVWGQGTTVTVSS

SEQ ID NO: 17789 - protein, 121 aa, Artificial Sequence
  Synthetic polypeptide representing artificial human antibody VH domain
QVQLVQSGAEVKKPGASVKVSCKVSGYTLTELSMHWVRQAPGKGLEWMGGFDPEDGETIYAQKFQGRVTMTEDTSTDTAYMELSSLRSEDTAVYYCATFWAVAALYYFDYWGQGTLVTVSS

SEQ ID NO: 17790 - protein, 126 aa, Artificial Sequence
  Synthetic polypeptide representing artificial human antibody VH domain
QVQLLESGPGLVRPSQTPSLTCSVSGASISSGNHFYTWIRQRPGQGLEWIGNIYPSGSTSYNPSLKSRLIISIDTSKNKFSLKVNSVTTADTAVYFCATGAAFSDGGSPMATFDLWGQGTLLNVSS

SEQ ID NO: 17791 - protein, 126 aa, Artificial Sequence
  Synthetic polypeptide representing artificial human antibody VH domain
EVQLLESGGGLVQPGGSLRLSCAASGFTFSTYAMNWVRQAPGKGLEWVSTISDTGVSTFYANSVKGRFTVSRDNSENTLFLQMNSLRAEDTAIYYCARTSFRSDWYFKPPNWFGPWAQGTLVTVSS

SEQ ID NO: 17792 - protein, 126 aa, Artificial Sequence
  Synthetic polypeptide representing artificial human antibody VH domain
QVQLQESGPGLVKPSETLSLTCTVSGGSISSYYWSWIRQPPGKGLEWIGYIYYSGSTNYNPSLKSRVTISVDTSKNQFSLKLSSVTAADTAVYYCARQRGVATIFGGYYYYGMDVWGQGTTVTVSS

SEQ ID NO: 17793 - protein, 127 aa, Artificial Sequence
  Synthetic polypeptide representing artificial human antibody VH domain
QVQLQESGPGLVKPSETLALTCTVSGVSITTYYWNWIRQPAGKGLEWIGRIFPSGSTNVNPSLKSRVAMSIDTSSNQFSLKLTSVTAADTGVYYCARVGTDYQGSGIFYNYYGMDAWGQGTTVTVSS

SEQ ID NO: 17794 - protein, 123 aa, Artificial Sequence
  Synthetic polypeptide representing artificial human antibody VH domain
QVQLVQSGAEVKKPGASVKVSCKASGYTFTGYYMHWVRQAPGQGLEWMGWINPNSGGTNYAQKFQGRVTMTRDTSISTAYMELSRLRSDDTAVYYCARSLLYGSGSYNHFDYWGQGTLVTVSS

SEQ ID NO: 17795 - protein, 125 aa, Artificial Sequence
  Synthetic polypeptide representing artificial human antibody VH domain
QLQLQESGPGLVKPSETLSLTCTVSGGSISSSSYYWGWIRQPPGKGLEWIGSIYYSGSTYYNPSLKSRVTISVDTSKNQFSLKLSSVTAADTAVYYCARHTRRWLQLRPSYFDYWGQGTLVTVSS

SEQ ID NO: 17796 - protein, 122 aa, Artificial Sequence
  Synthetic polypeptide representing artificial human antibody VH domain
QVQLVESGGGVVQPGRSLRLSCAASGFTFSSYGMHWVRQAPGKGLEWVAVIWYDGSNKYYADSVKGRFTISRDNSKNTLYLQMNSLRAEDTAVYYCARDLSSSWQSSTLDPWGQGTLVTVSS

SEQ ID NO: 17797 - protein, 131 aa, Artificial Sequence
  Synthetic polypeptide representing artificial human antibody VH domain
EVQLVESGGGLVQPGRSLRLSCTASGFTFGDYAMSWVRQAPGKGLEWVGFIRSKAYGGTTEYAASVKGRFTISRDDSKSIAYLQMNSLKTEDTAVYYCTRDIAIAAAGTLRWYYYYYMDVWGKGTTVTVSS

SEQ ID NO: 17798 - protein, 124 aa, Artificial Sequence
  Synthetic polypeptide representing artificial human antibody VH domain
QVQLVQSGAEVKKPGASVKVSCKASGYTFTGYYMHWVRQAPGQGLEWMGWINPNSGGTNYAQKFQGWVTMTRDTSISTAYMELSRLRSDDTAVYYCARDLGQWLVRGIRGFDYWGQGTLVTVSS

SEQ ID NO: 17799 - protein, 127 aa, Artificial Sequence
  Synthetic polypeptide representing artificial human antibody VH domain
QVQLQESGPGLVKPSQTLSLTCTVSGGSISSGGYYWSWIRQHPGKGLEWIGYIYYSGSTYYNPSLKSRVTISVDTSKNQFSLKLSSVTAADTAVYYCARCTRDILTGYYLGNWFDPWGQGTLVTVSS

SEQ ID NO: 17800 - protein, 115 aa, Artificial Sequence
  Synthetic polypeptide representing artificial human antibody VH domain
EVHLLESGGGLVQPGGSLRLSCAVSGFALRGNGMTWVRQAPGKGLEWVSSIYGNTGNTDHADSVKGRFTISGDNSKNMLHLHMNSLRADDTAVYYCFGHGSSSYWGQGTLVTVSS

SEQ ID NO: 17801 - protein, 129 aa, Artificial Sequence
  Synthetic polypeptide representing artificial human antibody VH domain
QVQLVQSGAEVKKPGASVKVSCKVSGYTLTELSMHWVRQAPGKGLEWMGGFDPEDGETIYAQKFQGRVTMTEDTSTDTAYMELSSLRSEDTAVYYCATGPAHYYDSSGYYYYYYGMDVWGQGTTVTVSS

SEQ ID NO: 17802 - protein, 123 aa, Artificial Sequence
  Synthetic polypeptide representing artificial human antibody VH domain
EVQLLESGGGLIPPGGSLRLSCAASGLSFTSFAMSWVRQAPGKGLEWVSGISSGGRTHYADSAKGRFTISRDNSKNSVYLDMGSLRAEDTALYYCAKQMSSGWYGGQFAFDIWGQGTMVTVSS

SEQ ID NO: 17803 - protein, 126 aa, Artificial Sequence
  Synthetic polypeptide representing artificial human antibody VH domain
QVQLVQSGAEVKKPGASVKVSCKVSGYTLTELSMHWVRQAPGKGLEWMGGFDPEDGETIYAQKFQGRVTMTEDTSTDTAYMELSSLRSEDTAVYYCATSPAYYYGSGNILHWFDPWGQGTLVTVSS

SEQ ID NO: 17804 - protein, 124 aa, Artificial Sequence
  Synthetic polypeptide representing artificial human antibody VH domain
QVQLQESGPGLVKPSETLSLTCTVSGGSISSYYWSWIRQPPGKGLEWIGYIYYSGSTNYNPSLKSRVTISVDTSKNQFSLKLSSVTAADTAVYYCARHGGGKYNWNDEGWFDPWGQGTLVTVSS

SEQ ID NO: 17805 - protein, 124 aa, Artificial Sequence
  Synthetic polypeptide representing artificial human antibody VH domain
QITLKESGPTLVKPTQTLTLTCTFSGFSLSTSGVGVGWIRQPPGKALEWLALIYWDDDKRYSPSLKSRLTITKDTSKNQVVLTMTNMDPVDTATYYCAHKTTMIVVVGDAFDIWGQGTMVTVSS

SEQ ID NO: 17806 - protein, 127 aa, Artificial Sequence
  Synthetic polypeptide representing artificial human antibody VH domain
QVQLVQSGAEVKKPGASVKVSCKASGYTFTGYYMHWVRQAPGQGLEWMGWINPNSGGTNYAQKFQGWVTMTRDTSISTAYMELSRLRSDDTAVYYCARGSSRHIVVVTAHYWYFDLWGRGTLVTVSS

SEQ ID NO: 17807 - protein, 117 aa, Artificial Sequence
  Synthetic polypeptide representing artificial human antibody VH domain
QVQLVQSGAEVMEPGASVKVSCGTSGYRFTTYHIHWVRQAPGQGPEWMGRFDPTGGPTLYARKFQDRLTITGDASTSTVFMELRALKSEDTAVYFCARDGFGDLEFWGHGTLVTVSS

SEQ ID NO: 17808 - protein, 124 aa, Artificial Sequence
  Synthetic polypeptide representing artificial human antibody VH domain
QVQLQQSGPGLVRPSETLSLTCTVNGASITTYYWNWIRQPPGKGLEWIANIYSSGSTNYNPSLKRRVSISVDTSKNRFSLQLNSVTAADTAVYYCARGSTQWFGTSMGNWFDPWGQGILVTVSS

SEQ ID NO: 17809 - protein, 129 aa, Artificial Sequence
  Synthetic polypeptide representing artificial human antibody VH domain
EVQLVQSGAEVKKPGESLKISCKGSGYSFTSYWIGWVRQMPGKGLEWMGIIYPGDSDTRYSPSFQGQVTISADKSISTAYLQWSSLKASDTAMYYCARHGADCTNGVCYSSDYYYMDVWGKGTTVTVSS

SEQ ID NO: 17810 - protein, 130 aa, Artificial Sequence
  Synthetic polypeptide representing artificial human antibody VH domain
QVQLVQSGAEVKKPGASVKVSCKVSGYTLTELSMHWVRQAPGKGLEWMGGFDPEDGETIYAQKFQGRVTMTEDTSTDTAYMELSSLRSEDTAVYYCATTTPGGYYYDSSGYPLTSWFDPWGQGTLVTVSS

SEQ ID NO: 17811 - protein, 123 aa, Artificial Sequence
  Synthetic polypeptide representing artificial human antibody VH domain
EVQLVESGGGLVQPGGSLRLSCAASGFTVSSNYMSWVRQAPGKGLEWVSVIYSGGSTYYADSVKGRFTISRHNSKNTLYLQMNSLRAEDTAVYYCARTDPNTIFGVVTHFDYWGQGTLVTVSS

SEQ ID NO: 17812 - protein, 118 aa, Artificial Sequence
  Synthetic polypeptide representing artificial human antibody VH domain
QVQLVESGGGLVKPGGSLRLSCAASGFTFSDFYMSWIRQAPGKGLEWISYIGLHGTTLYYADSVKGRFTISRDSAKNSLYLQMNSLRAEDTAVYYCASGLSRGLFDFWGQGTLVTVSS

SEQ ID NO: 17813 - protein, 121 aa, Artificial Sequence
  Synthetic polypeptide representing artificial human antibody VH domain
QVQLVQSGAEVKKPGASVKVSCKVSGYTLTELSMHWVRQAPGKGLEWMGGFDPEDGETIYAQKFQGRVTMTEDTSTDTAYMELSSLRSEDTAVYYCATASIVGATGWFDPWGQGTLVTVSS

SEQ ID NO: 17814 - protein, 123 aa, Artificial Sequence
  Synthetic polypeptide representing artificial human antibody VH domain
EVQLVESGGGLVQPGGSLRLSCAASGFTFSSYWMSWVRQAPGKGLEWVANVKQDGSEKYYLDSVKGRFTLSRDNAKNSLYLQMNSLRAEDTAVYYCARDDSRGWNPRGRMDYWGQGTLVTVSS

SEQ ID NO: 17815 - protein, 123 aa, Artificial Sequence
  Synthetic polypeptide representing artificial human antibody VH domain
QVQLVQSGAEVKKPGASVKVSCKVSGYTLTELSMHWVRQAPGKGLEWMGGFDPEDGETIYAQKFQGRVTMTEDTSTDTAYMELSSLRSEDTAVYYCATVKRTEWELLDAFDIWGQGTMVTVSS

SEQ ID NO: 17816 - protein, 118 aa, Artificial Sequence
  Synthetic polypeptide representing artificial human antibody VH domain
EVQLLESGGTLVQPGGSLRLSCAASGFTFSNSAMNWVRQAPGKGLEWVSGISGSGDRTNYGDSVKGRFTIYRDNSKNTLYLQMNSLRAEDSAVYRCASASRTGDFDHWGPGTRVTVSS

SEQ ID NO: 17817 - protein, 127 aa, Artificial Sequence
  Synthetic polypeptide representing artificial human antibody VH domain
QVQLQESGPGLVKPSQTLSLTCTVSGGSITSGDSYWTWIRQPPGKGLEWIGYISYSGSTFYSPSLKSRLTMSLHTSKNQLSLKLTSVTAADTAVYFCARDLAVGDCSGASCFGLDSWGQGTLVTVSS

SEQ ID NO: 17818 - protein, 124 aa, Artificial Sequence
  Synthetic polypeptide representing artificial human antibody VH domain
QVTLKESGPVLVKPTETLTLTCTVSGFSLSNARMGVSWIRQPPGKALEWLAHIFSNDEKSYSTSLKSRLTISKDTSKSQVVLTMTNMDPVDTATYYCARILRDWLSYYYYINVWGKGTTVTVSS

SEQ ID NO: 17819 - protein, 125 aa, Artificial Sequence
  Synthetic polypeptide representing artificial human antibody VH domain
EVQLLESGGGLVQPGGCLRLSCAASEFTFSNYAMSWVRQAPGKGLEWVSQISGSGRNTNYADSVKGRFTISRDNSKNTLYLQMNSLRAEDTAIYYCAKDTGNYDTSGCRGLFGYWGQGTLVTVSS

SEQ ID NO: 17820 - protein, 130 aa, Artificial Sequence
  Synthetic polypeptide representing artificial human antibody VH domain
QVQLQESGPGLVKPSQTLSLTCTVSGGSISSGSYYWSWIRQPAGKGLEWIGRIYTSGSTNYNPSLKSRVTISVDTSKNQFSLKLSSVTAADTAVYYCAATSVYYDILTGYYRLHDAFDIWGQGTMVTVSS

SEQ ID NO: 17821 - protein, 121 aa, Artificial Sequence
  Synthetic polypeptide representing artificial human antibody VH domain
EVQLVESGGGLVQPGGSLRLSCAASGFTFSSYWMHWVRQAPGRGLVCVSRITSDGSSASYADSVKGRFTISRDNAKNTLYLQMNSLRVDDTAVYYCAREAVAGTRNWFDPWGQGTLVTVSS

SEQ ID NO: 17822 - protein, 121 aa, Artificial Sequence
  Synthetic polypeptide representing artificial human antibody VH domain
EVQLVESGGGLVKPGGSLRLSCAASGFSISSYSMNWVRQAPGKGLEWVSSISRSSRNIYYEDSVKGRFTISRDNARNSLYLQMNSLRAEDTAVYYCARAIDGYIGDYFEYWGQGTLVTVSS

SEQ ID NO: 17823 - protein, 121 aa, Artificial Sequence
  Synthetic polypeptide representing artificial human antibody VH domain
QVQLVESGGGVVQPGRSLRLSCAASGFIFSSYAMHWVRQAPGKGLEWVAVISYDGSNKYSADSVKGRFTFSRDNSKNTLYLQMNSLRAEDTAVYYCARPGGGNYLASFDYWGQGTLVTVSS

SEQ ID NO: 17824 - protein, 121 aa, Artificial Sequence
  Synthetic polypeptide representing artificial human antibody VH domain
EVQLLESGGDLVQPGGSLRVSCAASGFTFSTYVMNWVRQAPGKGLEWVSAISVSGDTPYYADSVKGRFTISRDNSKNTLYLQMNSLRAEDTAVYYCAKGSGWHYYYGVDVWGQGTTVTVSS

SEQ ID NO: 17825 - protein, 124 aa, Artificial Sequence
  Synthetic polypeptide representing artificial human antibody VH domain
EVQLVQSGAEVRKPGESLNISCQSSGYNFNDYWIGWLRQKPGQGLEWMGIIYPGDSDTRYSPSFQGRVTISADKPITTAYLQLSGLTASDTAIYYCARHNILFRRIYYFYMDVWGKGTTVTVSS

SEQ ID NO: 17826 - protein, 122 aa, Artificial Sequence
  Synthetic polypeptide representing artificial human antibody VH domain
EVQLVESGGGLVQPGGSLRLSCAASGFTFSSYEMNWVRQAPGKGLEWVSYISSSGSTIYYADSVKGRFTISRDNAKNSLYLQMNSLRAEDTAVYYCAREGSPSATLERENYWGQGTLVTVSS

SEQ ID NO: 17827 - protein, 124 aa, Artificial Sequence
  Synthetic polypeptide representing artificial human antibody VH domain
QVQLVQSGAEVKKPGSSVKVSCKASGGTFSSYAISWVRQAPGQGLEWMGRIIPILGIANYAQKFQGRVTITADKSTSTAYMELSSLRSEDTAVYYCARDTSPYYDSSGPYFDYWGQGTLVTVSS

SEQ ID NO: 17828 - protein, 126 aa, Artificial Sequence
  Synthetic polypeptide representing artificial human antibody VH domain
QVQLQQWGAGLLKPSETLSLTCAVYGGSFSGYYWSWIRQPPGKGLEWIGEINHSGSTNYNPSLKSRVTISVDTSKNQFSLKLSSVTAADTAVYYCARANVLRYFDWSYYYYGMDVWGQGTTVTVSS

SEQ ID NO: 17829 - protein, 123 aa, Artificial Sequence
  Synthetic polypeptide representing artificial human antibody VH domain
QLQLQESGPGLVKPSETLSLTCTVSGGSISSSTYFWDWIRQPPGKGLEWIGSIYYSGSTYYNPSLKSPVTMSVDTSKNQFSLKVSSVTAADTAVYYCARHRVAASVRYHFDYWGQGTLVTVSS

SEQ ID NO: 17830 - protein, 124 aa, Artificial Sequence
  Synthetic polypeptide representing artificial human antibody VH domain
EVQLVESGGGLVKPGGSLRLSCAASGFTFSNAWMTWVRQAPGKGLEWVGRIKSKTDGGTTDYPAPVKGRFTISRDDSKNTLYLQMDSLETEDTAFYYCSTYLLVKWDAMRGAYWGQGTLVTVSS

SEQ ID NO: 17831 - protein, 128 aa, Artificial Sequence
  Synthetic polypeptide representing artificial human antibody VH domain
QVQLVESGGGVVQPGRSLRLSCAASGFTFSSYGMHWVRQAPGKGLEWVAVISYDGSNKYYADSVKGRFTISRDNSKNTLYLQMNSLRAEDTAVYYCAKDLGKRGSSGWYYYYYGMDVWGQGTTVTVSS

SEQ ID NO: 17832 - protein, 129 aa, Artificial Sequence
  Synthetic polypeptide representing artificial human antibody VH domain
QVQLVQSGAEVKKPGASVKVSCKASGYTFTSYGISWVRQAPGQGLEWMGWISAYNGNTNYAQKLQGRVTMTTDTSTSTAYMELRSLRSDDTAVYYCAREREFVSYGSGSYYKYNWFDPWGQGTLVTVSS

SEQ ID NO: 17833 - protein, 123 aa, Artificial Sequence
  Synthetic polypeptide representing artificial human antibody VH domain
EVQVVESGGGLVQPGGSLRLSCVASGLTFSDHYIDWVRQAPGKGLEWIGLIRNKPNSYTMQYAASVEGRFTISRDDSKNSVYLQVNSLKTEDTAVYYCGDIAIRREGSVFGFWGQGILVTVSS

SEQ ID NO: 17834 - protein, 122 aa, Artificial Sequence
  Synthetic polypeptide representing artificial human antibody VH domain
QVQLVQSGTEVKRPGASVKVSCKASGYTFTGYYIHWVRQAPGQGLEWMGWINPNSGGTNYAQKFQGRVTLTGDTSLSTAYMELSSLRSDDTAVYYCARDPRVRGVILIFDYWGQGTLVTVSS

SEQ ID NO: 17835 - protein, 120 aa, Artificial Sequence
  Synthetic polypeptide representing artificial human antibody VH domain
QITLKESGPTLVKPTQTLTLTCTFSGFSLSTSGVGVGWIRQPPGKALEWLALIYWDDDKRYSPSLKSRLTITKDTSKNQVVLTMTNMDPVDTATYYCAHVLYSGSYYEGWGQGTMVTVSS

SEQ ID NO: 17836 - protein, 124 aa, Artificial Sequence
  Synthetic polypeptide representing artificial human antibody VH domain
QVPLRQSGPEVVKPSETLSLTCTVSGAPITTYYWNWIRQPPGKGLEWIGNIHSSGDTNSNPSLKSRITMSLDTSRNQFSLRLTSVTAEDTAVYYCARGATHWFGDLLGNWFDPWGHGSLVSVST

SEQ ID NO: 17837 - protein, 129 aa, Artificial Sequence
  Synthetic polypeptide representing artificial human antibody VH domain
EVQLVESGGGLVQPGGSLRLTCAASGFTFSTYWMSWVRQAPGKGLEWVANIKQDGSEKYYVDSVKGRFTISRDNAKNSLYLQMNSLRAEDTAVYYCARNVAEAVYSSGWYYYYYYMDVWGKGTTVTVSS

SEQ ID NO: 17838 - protein, 123 aa, Artificial Sequence
  Synthetic polypeptide representing artificial human antibody VH domain
EVQLVESGGGVVQPGGSLRLSCAASGFTFDDYAMHWVRQAPGKGLEWVSLISGDGGSTYYADSVKGRFTISRDNSKNSLYLQMNSLRTEDTALYYCATNYYDSSGAPGVFDYWGQGTLVTVSS

SEQ ID NO: 17839 - protein, 127 aa, Artificial Sequence
  Synthetic polypeptide representing artificial human antibody VH domain
QVQLRESGPGLVKPSQTLSLTCTVSGDSISRGTYYWNWIRQPAGKGPEWIGRIFTRGSTNYNPSLKSRVTISADTSNNHFSLILTSVTAADTAVYFCARTPFSYDSSGFYYGFFDSWGQGILVTVSS

SEQ ID NO: 17840 - protein, 122 aa, Artificial Sequence
  Synthetic polypeptide representing artificial human antibody VH domain
EVHLVESGGGLVQPGGSLRLSCEASGFTFSRYWMNWIRQAPGKGLEWVAKIKNDGSEEYYVDSVKGRFSISRDNARSLLVLQMNSLRAEDTAVYYCARDGLWETGRGGFDYWGQGTLVTVSA

SEQ ID NO: 17841 - protein, 128 aa, Artificial Sequence
  Synthetic polypeptide representing artificial human antibody VH domain
QVQLQESGPGLVKPSQTLSLTCSVSGGPISSGNYYWSWIRQPPGKGLEWIGYIYYSGSTYFNPSLKSRVSISVDTSKNQFSLKLSSVTAADTAVYYCARVPFTIFGGVNYFYSYMDVWGKGTTVTVSS

SEQ ID NO: 17842 - protein, 132 aa, Artificial Sequence
  Synthetic polypeptide representing artificial human antibody VH domain
QVQLVQSGAEVKKPGASVKVSCKVSGYTLIELSMHWVRQAPGKGLEWMGGFDPEDGETIYAQKFQGRVTMTEDTSTDTAYMELSSLRSEDTAVYYCATHPSVVVPAASFPENYYYYYGMDVWGQGTTVTVSS

SEQ ID NO: 17843 - protein, 131 aa, Artificial Sequence
  Synthetic polypeptide representing artificial human antibody VH domain
QITLKESGPTLVKPTQTLTLTCTFSGFSLSTSGVGVGWIRQPPGKALEWLALIYWDDDKRYSPSLKSRLTITKDTSKNQVVLTMTNMDPVDTATYYCAHRPTVGYYDILTGYRSHNWFDPWGQGTLVTVSS

SEQ ID NO: 17844 - protein, 122 aa, Artificial Sequence
  Synthetic polypeptide representing artificial human antibody VH domain
QVQLVQSGAEVKKPGASVKVSCKVSGYTLTELSMHWVRQAPGKGLEWMGGFDPEDGETIYAQKFQGRVTMTEDTSTDTAYMELSSLRSEDTAVYYCATVPPGPGGELSLDYWGQGTLVTVSS

SEQ ID NO: 17845 - protein, 123 aa, Artificial Sequence
  Synthetic polypeptide representing artificial human antibody VH domain
QVQLQESGPGLVKPSQTLSLTCTVSGGSISSGGYYWSWIRQHPGKGLEWIGYIYYSGSTYYNPSLKSRVTISVDTSKNQFSLKLSSVTAADTAVYYCARFATWFGELFGFDYWGQGTLVTVSS

SEQ ID NO: 17846 - protein, 120 aa, Artificial Sequence
  Synthetic polypeptide representing artificial human antibody VH domain
QVQLQQWGAGLLKPSETLSLTCAVYGGSFSGYYWSWIRQPPGKGLEWIGEINHSGSTNYNPSLKSRVTISVDTSKNQFSLKLSSVTAADTAVYYCARGRSILWWWPLDYWGQGTLVTVSS

SEQ ID NO: 17847 - protein, 129 aa, Artificial Sequence
  Synthetic polypeptide representing artificial human antibody VH domain
QVQLQQWGAGLLKPSETLSLTCAVYGGSFSGYYWSWIRQPPGKGLEWIGEINHSGSTNYNPSLKSRVTISVDTSKNQFSLKLSSVTAADTAVYYCARGHRTGRITMIVVVITSYWFDPWGQGTLVTVSS

SEQ ID NO: 17848 - protein, 121 aa, Artificial Sequence
  Synthetic polypeptide representing artificial human antibody VH domain
QVQLVQSGAEVEKPGASVKVSCKASGYTFTGYYLHWVRQAPGQGLEWLGWINPNSGGTNYAQKFQGRVTMTRDTSISTAYMELSRLRSDDTAVYYCARNSYYGSGHPFDPWGQGTLVTVSS

SEQ ID NO: 17849 - protein, 126 aa, Artificial Sequence
  Synthetic polypeptide representing artificial human antibody VH domain
QVQLQQSGPGLVKPSQTLSLTCAISGDSVSSNSAAWNWIRQSPSRGLEWLGRTYYRSKWYNDYAVSVKSRITINPDTSKNQFSLQLNSVTPEDTAVYYCARETTVTYYYYYYMDVWGKGTTVTVSS

SEQ ID NO: 17850 - protein, 127 aa, Artificial Sequence
  Synthetic polypeptide representing artificial human antibody VH domain
QVQLQESGPGLVKPSETLSLTCTVSGGSISSYYWSWIRQPPGKGLEWIGYIYYSGSTNYNPSLKSRVTISVDTSKNQFSLKLSSVTAADTAVYYCARSGYLIGELLSYYYYYGMDVWGQGTTVTVSS

SEQ ID NO: 17851 - protein, 122 aa, Artificial Sequence
  Synthetic polypeptide representing artificial human antibody VH domain
QVQLQESGPGLVKPSQTLSLTCTVSGGSISSGSYYWSWIRQPAGKGLEWIGRIYTSGSTNYNPSLKSRVTISVDTSKNQFSLKLSSVTAADTAVYYCARGGAGYYYYYMDVWGKGTTVTVSS

SEQ ID NO: 17852 - protein, 120 aa, Artificial Sequence
  Synthetic polypeptide representing artificial human antibody VH domain
EVQLLESGGDLVQPGGSLRLSCAASGFTFSSFAMSWARQAPGKGLAWVSAISGRGDDTNYADSVKGRFTISRDNSKNTLYLQMNSLRPEDTAIYYCAKGSPRIREGPDYWGQGTLVTVSS

SEQ ID NO: 17853 - protein, 132 aa, Artificial Sequence
  Synthetic polypeptide representing artificial human antibody VH domain
QVQLVESGGGVVQPGRSLRLSCAASGFTFSSYGMHWVRQAPGKGLEWVAVIWYDGSNKYYADSVKGRFTISRDNSKNTLYLQMNSLRAEDTAVYYCARDGPYYYDSSGYYYPRPWNYYMDVWGKGTTVTVSS

SEQ ID NO: 17854 - protein, 123 aa, Artificial Sequence
  Synthetic polypeptide representing artificial human antibody VH domain
QVQLVESGGGVVQPGRSLRLSCAASGFTFSSYGMHWVRQAPGKGLEWVAVISYDGSNKYYADSVKGRFTISRDNSKNTLYLQMNSLRAEDTAVYYCAKDESLLWFGELHFDYWGQGTLVTVSS

SEQ ID NO: 17855 - protein, 123 aa, Artificial Sequence
  Synthetic polypeptide representing artificial human antibody VH domain
QVQLVQSGAEVKKPGSSVKVSCKASGGTFSSYTFAWVRLAPGQGLQWMGRIIPILGVINYAQNFLGRVTISAGESTSTTYMELSSLTSEDTAVYYCASPSPRDGYGDYVYDYWGQGTLITVSS

SEQ ID NO: 17856 - protein, 132 aa, Artificial Sequence
  Synthetic polypeptide representing artificial human antibody VH domain
QVQLVESGGGVVQPGRSLRLSCAASGFTFSSYGMHWVRQAPGKGLEWVAVIWYDGSNKYYADSVKGRFTISRDNSKNTLYLQMNSLRAEDTAVYYCARALYYYDSSGYYSPPLYYYYGMDVWGQGTTVTVSS

SEQ ID NO: 17857 - protein, 118 aa, Artificial Sequence
  Synthetic polypeptide representing artificial human antibody VH domain
EVQLVESGGGLVQPGGSLRLSCAASGFTVSSNYMSWVRQAPGKGLEWVSVIYSGGSTYYADSVKGRFTISRHNSKNTLYLQMNSLRAEDTAVYYCARVLPYGDYYDYWGQGTLVTVSS

SEQ ID NO: 17858 - protein, 128 aa, Artificial Sequence
  Synthetic polypeptide representing artificial human antibody VH domain
QVQLQQSGPGLVKPSQTLSLTCAISGDSVSSNSAAWNWIRQSPSRGLEWLGRTYYRSKWYNDYAVSVKSRITINPDTSKNQFSLQLNSVTPEDTAVYYCARTPRQWLVLYYYYYMDVWGKGTTVTVSS

SEQ ID NO: 17859 - protein, 120 aa, Artificial Sequence
  Synthetic polypeptide representing artificial human antibody VH domain
QVQLVQSGAEVKKPGASVKVSCRVSGDSLTEFSMHWVRQAPGIGLEWMGSFDPLDGESIYAQKFQDRITMTEDTSTDTAYMELNSLRSDDTAVYYCAIDLSRLGDLSRTWGQGTQVTVSS

SEQ ID NO: 17860 - protein, 125 aa, Artificial Sequence
  Synthetic polypeptide representing artificial human antibody VH domain
QVQLVQSGTEVKKPGASVKVSCKASGYTFTTYDITWVRQAPGQGLEWLGWMNPKSGSTAFAERFQGRVILTRNTSINTAYMEVTSLTSQDTAVYYCARFRSVPGVRPASYYCDFWAQGTQVIVSS

SEQ ID NO: 17861 - protein, 118 aa, Artificial Sequence
  Synthetic polypeptide representing artificial human antibody VH domain
QVQLVESGGGVVQPGTSLRLSCAASGFTFSNYGMYWVRQAPGKGLEWVAAIWYDGSIKYYTDSVKGRFTIARDNSKNTLYLQMNSLRAEDTAVFYCARSSAATAFDIWGQGTMVSVSS

SEQ ID NO: 17862 - protein, 120 aa, Artificial Sequence
  Synthetic polypeptide representing artificial human antibody VH domain
EVQLVDSGGGLVQPGGSLRLSCAASGFTFSSYEMNWVRQAPGKGLEWISYINARGNSKYYADSVKGRFTVSRDNAENSLYLQMYSLRAEDTAVYYCAREVKVTPDAFDIWGQGTLVTVSS

SEQ ID NO: 17863 - protein, 121 aa, Artificial Sequence
  Synthetic polypeptide representing artificial human antibody VH domain
EVQLLESGGGLVQPGGSLRLSCAASRFTFSSYAMSWVRQAPGKGLEWVSAISGSGGSTYYADSVKGRFTISRDNSKNTLYLQMNSLRAEDTAVYYCAKAQTIVLMVYAIDWGQGTLVTVSS

SEQ ID NO: 17864 - protein, 124 aa, Artificial Sequence
  Synthetic polypeptide representing artificial human antibody VH domain
QLQLQESGPGLVKPSETLSLTCTVSGGSISSSSYYWGWIRQPPGKGLEWIGSIYYSGSTYYNPSLKSRVTISVDTSKNQFSLKLSSVTAADTAVYYCARKEAVAVAGLYYFDYWGQGTLVTVSS

SEQ ID NO: 17865 - protein, 129 aa, Artificial Sequence
  Synthetic polypeptide representing artificial human antibody VH domain
QVQLQESGPGLVKPSQTLSLTCTVSGGSISSGSYYWSWIRQPAGKGLEWIGRIYTSGSTNYNPSLKSRVTISVDTSKNQFSLKLSSVTAADTAVYYCARERGQRWLQLKDYYYYYMDVWGKGTTVTVSS

SEQ ID NO: 17866 - protein, 121 aa, Artificial Sequence
  Synthetic polypeptide representing artificial human antibody VH domain
QVQLVQSGAEVKKPGASVKVSCKASGYTFTSYDLNWVRQAPGQGLEWMGWMNPNSGDTGYAQKFQGRVTMTRDTSISTAYMELSSLRSEDTAVYYCARETRGYSSGWSDYWGQGTLVTVSS

SEQ ID NO: 17867 - protein, 119 aa, Artificial Sequence
  Synthetic polypeptide representing artificial human antibody VH domain
EVQLLESGGGLFPPGGSLRLSCAASGFFLRGRGLAWVRQAPGKGLEWVSTISGDGKSTHYADSVQGRFTVSRDNSRNIVFLQMDSLRAEDTAEYFCATDAGTSWPFFYWGQGTLVTVSS

SEQ ID NO: 17868 - protein, 120 aa, Artificial Sequence
  Synthetic polypeptide representing artificial human antibody VH domain
EVHLVESGGGLVQPGGSLRLSCAASGFTFSSYEMNWVRQAPGKGLEWLAYIRSSRSAIYYTDSVKGRFTVSIDNAKDSLYLQMNSLRAEDTAVYYCAREITVTPDAFDIWGQGTMVTVSS

SEQ ID NO: 17869 - protein, 120 aa, Artificial Sequence
  Synthetic polypeptide representing artificial human antibody VH domain
QVQLVESGGGVVQPGRSLRLSCAASGFTFSSYGMHWVRQAPGKGLEWVAVISYDGSNKYYADSVKGRFTISRDNSKNTLYLQMNSLRAEDTAVYYCAKDDDYYDKVMDVWGQGTTVTVSS

SEQ ID NO: 17870 - protein, 123 aa, Artificial Sequence
  Synthetic polypeptide representing artificial human antibody VH domain
EVELVESGGGLVQPGGSLRLSCAASGFTVSSNYMSWVRQAPGKGLEWVSVIYSGGSTYYADSVKGRFTISRHNSKNTLYLQMNSLRSEDTAVYFCARDPITSSGNYWGSFDYWGQGALVTVSS

SEQ ID NO: 17871 - protein, 119 aa, Artificial Sequence
  Synthetic polypeptide representing artificial human antibody VH domain
QVTLRESGPALVKPTQTLTLTCTFSGFSLSTSGMCVSWIRQPPGKALEWLARIDWDDDKYYSTSLKTRLTISKDTSKNQVVLTMTNMDPVDTATYYCARIYGSGIPDYWGQGTLVTVSS

SEQ ID NO: 17872 - protein, 129 aa, Artificial Sequence
  Synthetic polypeptide representing artificial human antibody VH domain
QVQLQHWGAGLLKPSETLSLTCGVSGGPFSDSYWNWIRQPPGKGLEWIGEISPSGDTSYNPSLGSRVTISVDTSKSQFSLRLTPLTAADTAVYYCARGARQLYRSGWFEYYYYYYMDVWDTGTTVTVSS

SEQ ID NO: 17873 - protein, 127 aa, Artificial Sequence
  Synthetic polypeptide representing artificial human antibody VH domain
QLQLQESGPGLVKPSETLSLTCTVSGGSISSSSYYWGWIRQPPGKGLEWIGSIYYSGSTYYNPSLKSRVTISVDTSKNQFSLKLSSVTAADTAVYYCARMKFITMIVVVTREGFDPWGQGTLVTVSS

SEQ ID NO: 17874 - protein, 122 aa, Artificial Sequence
  Synthetic polypeptide representing artificial human antibody VH domain
QVQLVESGGGVVQPGRSLRLSCAASGFTFSSYGMHWVRQAPGKGLEWVAVIWYDGSNKYYADSVKGRFTISRDNSKNTLYLQMNSLRAEDTAVYYCASDLGSYGGFEYFDLWGRGTLVTVSS

SEQ ID NO: 17875 - protein, 126 aa, Artificial Sequence
  Synthetic polypeptide representing artificial human antibody VH domain
EVQLVESGGGLVQPGGSLRLSCAASGFTFSNYEMNWVRQAPGKGLEWVSYISSSGSAIYYADSVKGRFTISRDNAKNSLYVQMNSLRAEDTAIYYCARDARFFYDSSGYSNAFDIWGQGTMVTVSS

SEQ ID NO: 17876 - protein, 126 aa, Artificial Sequence
  Synthetic polypeptide representing artificial human antibody VH domain
QVQLVQSGAEVKKPGASVKVSCKASGYTFTSYYMHWVRQAPGQGLEWMGIINPSGGSTSYAQKFQGRVTMTRDTSTSTVYMELSSLRSEDTAVYYCARRDYYDSSGYYPGYGMDVWGQGTTVTVSS

SEQ ID NO: 17877 - protein, 118 aa, Artificial Sequence
  Synthetic polypeptide representing artificial human antibody VH domain
QITLKESGPTLVKPTQTLTLTCTFSGFSLSTSGVGVGWIRQPPGKALEFLTLIYWDGDKRYNPSLMRRLAITKDTSKNQVVLTMTSMDPVDTATYFCAHLTNRDIDYWGQGTLVTVSS

SEQ ID NO: 17878 - protein, 121 aa, Artificial Sequence
  Synthetic polypeptide representing artificial human antibody VH domain
QVQLVESGGGVVQPGRSLRLSCAASGFTFSSYAMHWVRQAPGKGLEWVAVISYDGSNKYYADSVKGRFTISRDNSKNTLYLQMNSLRAEDTAVYYCARSYSGSYRGAFDIWGQGTMVTVSS

SEQ ID NO: 17879 - protein, 121 aa, Artificial Sequence
  Synthetic polypeptide representing artificial human antibody VH domain
QVQLVESGGGVVQPGRSLRLSCAVSGFTFNSYAMHWVRQAPGKGLEWVANIYNDGSNKRYADSVKGRFTISRDNSKNTLYLQMDSLRAEDTAMYYCAKDERARGGWAFDHWGQGTLVTVSS

SEQ ID NO: 17880 - protein, 123 aa, Artificial Sequence
  Synthetic polypeptide representing artificial human antibody VH domain
QVQLQESGPGLVKPSQTLSLTCAVSGGSISSGDYYWSWIRQPPGKGLEWIGYIFYSGSTIYNPSLKSRVTISVDTSKNQFSLRLNSVTAADTAVYYCARSTSGWTSEIYIDYWGQGTLVTVSS

SEQ ID NO: 17881 - protein, 124 aa, Artificial Sequence
  Synthetic polypeptide representing artificial human antibody VH domain
QVQLVESGGGVVQPGRSLRLSCVASGFTFSTYGMHWVRQAPGKGLEWVAVIWYDGSNKYYADSVKGRFTISRDNSKNTLYLQMNSLRAEDTAVYYCARREAEDRAMAPSHFDYWGQGTLVTVSS

SEQ ID NO: 17882 - protein, 121 aa, Artificial Sequence
  Synthetic polypeptide representing artificial human antibody VH domain
QVQLVQSGAEVKKPGASVKVSCKVSGYTLTELSMHWVRQAPGKGLEWMGGFDPEDGETIYAQKFQGRVTMTEDTSTDTAYMELSSLRSEDTAVYYCATTAVAGRVNWFDPWGQGTLVTVSS

SEQ ID NO: 17883 - protein, 120 aa, Artificial Sequence
  Synthetic polypeptide representing artificial human antibody VH domain
EVQLVESGGGLVQPGGSLRLSCAASGFTFSSYEMNWVRQAPGKGLEWVSYISSSGSTIYYADSVKGRFTISRDNAKNSLYLQMNSLRAEDTAVYYCARFGGSYYGGFDYWGQGTLVTVSS

SEQ ID NO: 17884 - protein, 124 aa, Artificial Sequence
  Synthetic polypeptide representing artificial human antibody VH domain
QVQLQESGPGLVKPSQTLSLTCTVSGGSISSGGYYWSWIRQHPGKGLEWIGYIYYSGSTYYNPSLKSRVTISVDTSKNQFSLKLSSVTAADTAVYYCARTYYDILTGNFWFDPWGQGTLVTVSS

SEQ ID NO: 17885 - protein, 124 aa, Artificial Sequence
  Synthetic polypeptide representing artificial human antibody VH domain
QVTLRESGPALVKPTQTLTLTCTFSGFSLSTSGMCVSWIRQPPGKALEWLARIDWDDDKYYSTSLKTRLTISKDTSKNQVVLTMTNMDPVDTATYYCARMYYDILTGYFQEDYWGQGTLVTVSS

SEQ ID NO: 17886 - protein, 125 aa, Artificial Sequence
  Synthetic polypeptide representing artificial human antibody VH domain
QITLKESGPTLVKPTQTLTLTCTFSGFSLSTSGVGVGWIRQPPGKALEWLALIYWDDDKRYSPSLKSRLTITKDTSKNQVVLTMTNMDPVDTATYYCAHSCSGGSCYYSPGFDPWGQGTLVTVSS

SEQ ID NO: 17887 - protein, 122 aa, Artificial Sequence
  Synthetic polypeptide representing artificial human antibody VH domain
QVQLVESGGGVVQPGRSLRLSCAASGFTFSSYGMHWVRQAPGKGLEWVAVISYDGSNKYYADSVKGRFTISRDNSKNTLYLQMNSLRAEDTAVYYCAKDAEYSYGNPGMDVWGQGTTVTVSS

SEQ ID NO: 17888 - protein, 122 aa, Artificial Sequence
  Synthetic polypeptide representing artificial human antibody VH domain
QVQLQESGPGLVKPSETLSLTCTVSGGSISSYYWSWIRQPAGKGLEWIGRIYTSGSTNYNPSLKSRVTMSVDTSKNQFSLKLSSVTAADTAVYYCARDLGQWLGYYWYFDLWGRGTLVTVSS

SEQ ID NO: 17889 - protein, 123 aa, Artificial Sequence
  Synthetic polypeptide representing artificial human antibody VH domain
QVQLQESGPGLVKPSGTLSLTCAVSGGSISSSNWWSWVRQPPGKGLEWIGEIYHSGSTNYNPSLKSRVTISVDKSKNQFSLKLSSVTAADTAVYYCARAYTAMVTGAYYMDVWGKGTTVTVSS

SEQ ID NO: 17890 - protein, 127 aa, Artificial Sequence
  Synthetic polypeptide representing artificial human antibody VH domain
QVQLVQSGAEVKKPGASVKVSCKASGYTFTSYYMHWVRQAPGQGLEWMGIINPSGGSTNYAQKFQGRITMTRDTSTSTVYMELSSLRSEDTAVYYCARDWEGRLGLAIVDAGYFDYWGQGTLVTVSS

SEQ ID NO: 17891 - protein, 122 aa, Artificial Sequence
  Synthetic polypeptide representing artificial human antibody VH domain
QVQLVQSGAEVKKPGASVKVSCKVSGYTLTELSMHWVRQAPGKGLEWMGGFDPEDGETIYAQKFQGRVTMTEDTSTDTAYMELSSLRSEDTAVYYCATGPVITGTMDWFDPWGQGTLVTVSS

SEQ ID NO: 17892 - protein, 124 aa, Artificial Sequence
  Synthetic polypeptide representing artificial human antibody VH domain
EVQLVESGGGLVQPGGSLKLSCAASGFTFSGSAVHWVRQASGKGLEWVGRIRIKANAYATAYAASVKGRFTISRDDSNNTAYLQMNSLQTEDTAVYYCTRRPEEYCGGDCYIPWGQGTLVTVSS

SEQ ID NO: 17893 - protein, 128 aa, Artificial Sequence
  Synthetic polypeptide representing artificial human antibody VH domain
QVQLVESGGGLVKPGGSLRLSCAASGFTFSDYYMSWIRQAPGKGLEWVSYISSSGSTIYYADSVKGRFTISRDNAKNSLYLQMNSLRAEDTAVYYCARDKTTKQWLVLVDYYYGMDVWGQGTTVTVSS

SEQ ID NO: 17894 - protein, 127 aa, Artificial Sequence
  Synthetic polypeptide representing artificial human antibody VH domain
EVQLVQSGGEVKKPGESLKISCKASGYIFTKYWIGWVRQMPGKGLEWMGIIYPDDSDTRYSPSFQGQVTISADKSISTAYLQWTSLKASDTAMYYCARSLDSGGWGGTYNYYGMDVWGQGTAVTVSS

SEQ ID NO: 17895 - protein, 129 aa, Artificial Sequence
  Synthetic polypeptide representing artificial human antibody VH domain
QVQLVQSGAEVKKPGASVKVSCKASGYTFTGYYMHWVRQAPGQGLEWMGWINPNSGGTNYAQKFQGRVTMTRDTSISTAYMELSRLRSDDTAVYYCARDPPLYYYGSGSYQYYYGMDVWGQGTTVTVSS

SEQ ID NO: 17896 - protein, 118 aa, Artificial Sequence
  Synthetic polypeptide representing artificial human antibody VH domain
QVEVVESGGGVVQPETSLRLSCTASGFHFSGTDMHWVRQGPGKGLEWVAVISFDGSTRVYADSVQGRFTISRDNSENMVYLQMNNLRREDTAVYYCVRAALDDALDVWGQGTVVTVSS

SEQ ID NO: 17897 - protein, 121 aa, Artificial Sequence
  Synthetic polypeptide representing artificial human antibody VH domain
QVQLVQSGAEVKKPGASVKVSCKVSGYTLTELSMHWVRQAPGKGLEWMGGFDPEDGETIYAQKFQGRVTMTEDTSTDTAYMELSSLRSEDTAVYYCATSPGYSTENWFDPWGQGTLVTVSS

SEQ ID NO: 17898 - protein, 126 aa, Artificial Sequence
  Synthetic polypeptide representing artificial human antibody VH domain
QVQLVESGGGVVQPGRSLRLSCAASGFTFSSYAMYWVRQAPGKGLEWVAVISYDGSNKYYADSVKGRFTISRDNSKNTLYLQMNSLRAEDTAVYYCAREDVLRYFDWYPWSWFDPWGQGTLVTVSS

SEQ ID NO: 17899 - protein, 128 aa, Artificial Sequence
  Synthetic polypeptide representing artificial human antibody VH domain
QVQLVESGGGVVQPGRSLRLSCAASGFTFSSYGMHWVRQAPGKGLEWVAVISYDGSNKYYADSVKGRFTISRDNSKNTLYLQMNSLRAEDTAVYYCAKVAGHYYDSSGYYYEGGMDVWGQGTTVTVSS

SEQ ID NO: 17900 - protein, 127 aa, Artificial Sequence
  Synthetic polypeptide representing artificial human antibody VH domain
EVQLVESGGGLVQPGGSLRLSCAASGFTFSSYWMSWVRQAPGKGLEWVANIKQDGSEKYYVDSVKGRFTISRDNAKNSLYLQMNSLRAEDTAVYYCARDCSTSCIQANYYYYGMDVWGQGTTVTVSS

SEQ ID NO: 17901 - protein, 125 aa, Artificial Sequence
  Synthetic polypeptide representing artificial human antibody VH domain
QLQLQESGPGLVKPSETLSLTCTVSGGSISSSSYYWGWIRQPPGKGLEWIGSIYYSGSTYYNPSLKSRVTISVDTSKNQFSLKLSSVTAADTAVYYCARHRRQWLVRTPDAFDIWGQGTMVTVSS

SEQ ID NO: 17902 - protein, 129 aa, Artificial Sequence
  Synthetic polypeptide representing artificial human antibody VH domain
QVQLVESGGGLVKPGGSLRLSCAASGFTFSDYYMSWIRQAPGKGLEWVSYISSSGSTIYYADSVKGRFTISRDNAKNSLYLQMNSLRAEDTAVYYCARELKTYYDILTGYRRLYGMDVWGQGTTVTVSS

SEQ ID NO: 17903 - protein, 133 aa, Artificial Sequence
  Synthetic polypeptide representing artificial human antibody VH domain
QVQLVQSGAEVKKPGASVKVSCKVSGYTLTELSMHWVRQAPGKGLEWMGGFDPEDGETIYAQKFQGRVTMTEDTSTDTAYMELSSLRSEDTAVYYCATAPPVAPLKDYDILTGYLYYYGMDVWGQGTTVTVSS

SEQ ID NO: 17904 - protein, 121 aa, Artificial Sequence
  Synthetic polypeptide representing artificial human antibody VH domain
QVQLQESGPGLVKPSGTLSLTCAVSGGSISSSNWWSWVRQPPGKGLEWIGEIYHSGSTNYNPSLKSRVTISVDKSKNQFSLKLSSVTAADTAVYYCARLGGHGVGAPFDYWGQGTLVTVSS

SEQ ID NO: 17905 - protein, 117 aa, Artificial Sequence
  Synthetic polypeptide representing artificial human antibody VH domain
EVQLVESGGGLVQPGGSLRLSCAASGFTVSSNYMSWVRQAPGKGLEWVSVIYSGGSTYYADSVKGRFTISRDNSKNTLYLQMNSLRAEDTAVYYCARDYGDYYFDYWGQGTLVTVSS

SEQ ID NO: 17906 - protein, 127 aa, Artificial Sequence
  Synthetic polypeptide representing artificial human antibody VH domain
QLQLQESGPGLVKPSETLSLTCTVSGGSISSSSYYWGWIRQPPGKGLEWIGSIYYSGSTYYNPSLKSRVTISVDTSKNQFSLKLSSVTAADTAVYYCARHYGTMIVVVITPYYFDYWGQGTLVTVSS

SEQ ID NO: 17907 - protein, 122 aa, Artificial Sequence
  Synthetic polypeptide representing artificial human antibody VH domain
EVQLLESGGGLVQPGGSLRLSCAASGFTFSSYAMSWVRQAPGKGLEWVSAISGSGGSTYYADSVKGRFTISRDNSKNTLYLQMNSLRAEDTAVYYCATPREAIVVVTAFDYWGQGTLVTVSS

SEQ ID NO: 17908 - protein, 124 aa, Artificial Sequence
  Synthetic polypeptide representing artificial human antibody VH domain
QVQLVQSGAEVKKPGASVKVSCKVSGYTLTELSMHWVRQAPGKGLEWMGGFDPEDGETIYAQKFQGRVTMTEDTSTDTAYMELSSLRSEDTAVYYCATTSPFRGVPNLNWFDPWGQGTLVTVSS

SEQ ID NO: 17909 - protein, 126 aa, Artificial Sequence
  Synthetic polypeptide representing artificial human antibody VH domain
QVTLKESGPVLVKPTETLTLTCTVSGFSLSNARMGVSWIRQPPGKALEWLAHIFSNDEKSYSTSLKSRLTISKDTSKSQVVLTMTNMDPVDTATYYCARMGRRWLQLRPSHYFDYWGQGTLVTVSS

SEQ ID NO: 17910 - protein, 128 aa, Artificial Sequence
  Synthetic polypeptide representing artificial human antibody VH domain
EVQLVESGGGLVQPGRSLRLSCTASGFTFGDYAMSWVRQAPGKGLEWVGFIRSKAYGGTTEYAASVKGRFTISRDDSKSIAYLQMNSLKTEDTAVYYCTREDGCTNGVCYISNVFDYWGQGTLVTVSS

SEQ ID NO: 17911 - protein, 122 aa, Artificial Sequence
  Synthetic polypeptide representing artificial human antibody VH domain
QITLKESGPTLVKPTQTLTLTCTFSGFSLSTSGVGVGWIRQPPGKALEWLALIYWDDDKRYSPSLKSRLTITKDTSKNQVVLTMTNMDPVDTATYYCAHRRGLWFGEFFDYWGQGTLVTVSS

SEQ ID NO: 17912 - protein, 119 aa, Artificial Sequence
  Synthetic polypeptide representing artificial human antibody VH domain
QVQLQESGPGLVKPSETLSLTCSVSGGSINSYYWSWIRQPPGKGLEWIGYISRSASTTYNPSLKSRVTISVDTSKNQFSLKVTSVTAADTAVYFCAGQLYRGYEYFDYWGQGTLVTVSS

SEQ ID NO: 17913 - protein, 114 aa, Artificial Sequence
  Synthetic polypeptide representing artificial human antibody VH domain
EVQLVESGGGLVQPGGSLRLSCAASGFTFSSYWMHWVRQAPGKGLVWVSRINSDGSSTSYADSVKGRFTISRDNAKNTLYLQMNSLRAEDTAVYYCASMGFDIWGQGTMVTVSS

SEQ ID NO: 17914 - protein, 129 aa, Artificial Sequence
  Synthetic polypeptide representing artificial human antibody VH domain
QVQLQESGPGLVKPSQTLSLTCTVSGGSISSGSYYWSWIRQPAGKGLEWIGRIYTSGSTNYNPSLKSRVTISVDTSKNQFSLMLSSVTAADTAVYYCARERWAPYCSDGRCQADVFDVWGQGTLVTVSS

SEQ ID NO: 17915 - protein, 125 aa, Artificial Sequence
  Synthetic polypeptide representing artificial human antibody VH domain
QLQLQESGPGLVKPSETLSLTCTVSGGSISSSSYYWGWIRQPPGKGLEWIGSIYYSGSTYYNPSLKSRVTISVDTSKNQFSLKLSSVTAADTAVYYCARHVPRERWLAWAYFDLWGRGTLVTVSS

SEQ ID NO: 17916 - protein, 118 aa, Artificial Sequence
  Synthetic polypeptide representing artificial human antibody VH domain
QVQLQESGPGLVKPSETLSLTCTVSGGSISSYYWSWIRQPPGKGLEWIGYIYYSGSTNYNPSLKSRVTISVDTSKNQFSLKLSSVTAADTAVYYCAREAKDYWYFDLWGRGTLVTVSS

SEQ ID NO: 17917 - protein, 122 aa, Artificial Sequence
  Synthetic polypeptide representing artificial human antibody VH domain
QVQLQESGPGLVKPSETLSLTCTVSGGSISSYYWSWIRQPPGKGLEWIGYIYYSGSTNYNPSLKSRVTISVDTSKNQFSLKLSSVTAADTAVYYCARLYYDSSGYYGYFDYWGQGTLVTVSS

SEQ ID NO: 17918 - protein, 118 aa, Artificial Sequence
  Synthetic polypeptide representing artificial human antibody VH domain
EVRLVESGGGLVKPGGSLTLSCAASGFDFTNFFMKWVRQAPGKGLEWVSSISPSSTSKYYSDLVRGRFTVSRDNAAGSLFLHLSGLRAEDSAVYYCARGTDQFTGGSWGQGTLVRVSS

SEQ ID NO: 17919 - protein, 125 aa, Artificial Sequence
  Synthetic polypeptide representing artificial human antibody VH domain
QVQLVQSGAEVKKPGASVKVSCKASGYTFTSYGISWVRQAPGQGLEWMGWISAYNGNTNYAQKLQGRVTMTTDTSTSTAYMELRSLRSDDTAVYYCARDRYYYDSSGYSEPFDYWGQGTLVTVSS

SEQ ID NO: 17920 - protein, 122 aa, Artificial Sequence
  Synthetic polypeptide representing artificial human antibody VH domain
QVQLVQSGAEVKKPGASVKVSCKVSGYTLTELSMHWVRQAPGKGLEWMGGFDPEDGETIYAQKFQGRVTMTEDTSTDTAYMELSSLRSEDTAVYYCATMYALNYDVYYFDYWGQGTLVTVSS

SEQ ID NO: 17921 - protein, 129 aa, Artificial Sequence
  Synthetic polypeptide representing artificial human antibody VH domain
QVQLVQSGAEVKKPGASVKVSCKVSGYTLTELSMHWVRQAPGKGLEWMGGFDPEDGETIYAQKFQGRVTMTEDTSTDTAYMELSSLRSEDTAVYYCATAPSVAGRPPFDYYYYYGMDVWGQGTTVTVSS

SEQ ID NO: 17922 - protein, 121 aa, Artificial Sequence
  Synthetic polypeptide representing artificial human antibody VH domain
QVQLVQSGAEVKKPGASVKVSCKVSGYTLTELSMHWVRQAPGKGLEWMGGFDPEDGETIYAQKFQGRVTMTEDTSTDTAYMELSSLRSEDTAVYYCATGAAAGTVGWFDPWGQGTLVTVSS

SEQ ID NO: 17923 - protein, 129 aa, Artificial Sequence
  Synthetic polypeptide representing artificial human antibody VH domain
QLQLQESGPGLVKPSETLSLTCTVSGGSISSSSYYWGWIRQPPGKGLEWIGSIYYSGSTYYNPSLKSRVTISVDTSKNQFSLKLSSVTAADTAVYYCARQGGRITMIVVVSGPYYFDYWGQGTLVTVSS

SEQ ID NO: 17924 - protein, 124 aa, Artificial Sequence
  Synthetic polypeptide representing artificial human antibody VH domain
QVQLQESGPGLVKPSQTLSLTCTVSGGSISSGSYYWSWIRQPAGKGLEWIGRIYTSGSTNYNPSLKSRVTISVDTSKNQFSLKLSSVTAADTAVYYCAREWRRWLQYRGYFDYWGQGTLVTVSS

SEQ ID NO: 17925 - protein, 124 aa, Artificial Sequence
  Synthetic polypeptide representing artificial human antibody VH domain
EVQLLESGGDLVQPGGSLRLSCAASGFAFTTYGMSWVRRAPGKGLESVATISDTGGKTYYADSLKGRFTISRDNSKNILYLQMNSLRAEDTALYYCAKSMVRGVNYFYYGMDVWGQGTTVTVSS

SEQ ID NO: 17926 - protein, 132 aa, Artificial Sequence
  Synthetic polypeptide representing artificial human antibody VH domain
EVQLLESGGGLVQPGGSLRLSCAASGFTFSSYAMSWVRQAPGKGLEWVSAISGSGGSTYYADSVKGRFTISRDNSKNTLYLQMNSLRAEDTAVYYCAKDLNGGGLGITIFGVVMGHDAFDIWGQGTMVTVSS

SEQ ID NO: 17927 - protein, 119 aa, Artificial Sequence
  Synthetic polypeptide representing artificial human antibody VH domain
QVQLVESGGGVVQPGRSLRLSCAASGFTFSSYGMHWVRQAPGKGLEWVAVIWYDGSNKYYADSVKGRFTISRDNSKNTLYLQMNSLRAEDTAVYYCARSVLEDWYFDLWGRGTLVTVSS

SEQ ID NO: 17928 - protein, 122 aa, Artificial Sequence
  Synthetic polypeptide representing artificial human antibody VH domain
QLQLQESGPGLVKPSETLSLTCTVSGGSISSSSYYWGWIRQPPGKGLEWIGSIYYSGSTYYNPSLKSRVTISVDTSKNQFSLKLSSVTAADTAVYYCARLGWLFEPYGMDVWGQGTTVTVSS

SEQ ID NO: 17929 - protein, 129 aa, Artificial Sequence
  Synthetic polypeptide representing artificial human antibody VH domain
QVQLQESGPGLVKPSQTLSLTCTVSGGSISSGSYYWSWIRQPAGKGLEWIGRIYTSGSTNYNPSLKSRVTISVDTSKNQFSLKLSSVTAADTAVYYCARGGGVLLWFGELSGYYYMDVWGKGTTVTVSS

SEQ ID NO: 17930 - protein, 120 aa, Artificial Sequence
  Synthetic polypeptide representing artificial human antibody VH domain
QVQLVQSGAEVKKPGSSVKVSCKASGGTFSNYAFSWVRQAPGQGLEWMGRIIPILGGPNYAQKFQGGVTITADKSTNTAYMELSSLRSEDTAVYYCASGIAAATYYLDYWGQGTLVTVSS

SEQ ID NO: 17931 - protein, 119 aa, Artificial Sequence
  Synthetic polypeptide representing artificial human antibody VH domain
EVQLLESGGGLFPPGGSLRLSCAASGFFLRGRGLAWVRQAPGKGLEWVSTISGDGKSTHYADSVQGRFTVSRDNSRNIVFLQMDSLRAEDTAEYFCATDAGTSWHFFYWGQGTLVTVSS

SEQ ID NO: 17932 - protein, 124 aa, Artificial Sequence
  Synthetic polypeptide representing artificial human antibody VH domain
QVTLKESGPVLVKPTETLTLTCTVSGFSLSNARMGVSWIRQPPGKALEWLAHIFSNDEKSYSTSLKSRLTISKDTSKSQVVLTMTNMDPVDTATYYCARSTRGWLSALWWFDPWGQGTLVTVSS

SEQ ID NO: 17933 - protein, 120 aa, Artificial Sequence
  Synthetic polypeptide representing artificial human antibody VH domain
QITLKESGPTLVKPTQTLTLTCTFSGFSLSTSGVGVGWIRQPPGKALEWLALIYWDDDKRYSPSLKSRLTITKDTSKNQVVLTMTNMDPVDTATYYCAHRRAFYGYFDYWGQGTLVTVSS

SEQ ID NO: 17934 - protein, 129 aa, Artificial Sequence
  Synthetic polypeptide representing artificial human antibody VH domain
QVHLVESGGGVVQPGRSLRLSCESSGFGFNNYGMHWVRQAPGKGLEWVAVVSYDGSRRFYADSVKGRFTISKDNVKGTLYLQMNSLRANDTAVYYCAKDPRIFMITYGRPLADTHLDLWGQGTLVTVSS

SEQ ID NO: 17935 - protein, 122 aa, Artificial Sequence
  Synthetic polypeptide representing artificial human antibody VH domain
EVQLVESGGGLVQPGGSLRLSCAASGFTFSSYWMHWVRQAPGKGLVWVSRINSDGSTTRYADSVKGRFTISRDNAKNTLYLQMSSLRAEDTAVYYCARDRDRYSGNDGPVYWGQGTLVTVSS

SEQ ID NO: 17936 - protein, 130 aa, Artificial Sequence
  Synthetic polypeptide representing artificial human antibody VH domain
QVQLVQSGAEVKKPGASVKVSCKASGYTFTGYYMHWVRQAPGQGLEWMGWINPNSGGTNYAQKFQGRVTMTRDTSISTAYMELSRLRSDDTAVYYCAREMITDIVVVVAATVGYYGMDVWGQGTTVTVSS

SEQ ID NO: 17937 - protein, 125 aa, Artificial Sequence
  Synthetic polypeptide representing artificial human antibody VH domain
QVTLRESGPALVKPTQTLTLTCTFSGFSLSTSGMCVSWIRQPPGKALEWLARIDWDDDKYYSTSLKTRLTISKDTSKNQVVLTMTNMDPVDTATYYCARTYYDILTGYYYGMDVWGQGTTVTVSS

SEQ ID NO: 17938 - protein, 121 aa, Artificial Sequence
  Synthetic polypeptide representing artificial human antibody VH domain
QVQLVQSGAEVKKPGASVKVSCKVSGYTLTELSMHWVRQAPGKGLEWMGGFDPEDGETIYAQKFQGRVTMTEDTSTDTAYMELSSLRSEDTAVYYCATGVVRGVTNWFDPWGQGTLVTVSS

SEQ ID NO: 17939 - protein, 129 aa, Artificial Sequence
  Synthetic polypeptide representing artificial human antibody VH domain
EVQLVESGGGLVQPGGSLRLSCAASGFTFSSYWMSWVRQAPGKGLEWVANIKQDGSEKYYVDSVKGRFTISRDNAKNSLYLQMNSLRAEDTAVYYCARVPGIAVAGTLYYYYYYYMDVWGKGTTVTVSS

SEQ ID NO: 17940 - protein, 124 aa, Artificial Sequence
  Synthetic polypeptide representing artificial human antibody VH domain
EVQLVESGGGLVQPGRSLRLSCAASGFTFDDYAMHWVRQAPGKGLEWVSGISWNSGSIGYADSVKGRFTISRDNAKNSLYLQMNSLRAEDTALYYCAKAQGTYSSYYYYGMDVWGQGTTVTVSS

SEQ ID NO: 17941 - protein, 124 aa, Artificial Sequence
  Synthetic polypeptide representing artificial human antibody VH domain
QVQLVQSGAEVKKPGSSVIVSCKASGASFDNNAINWVRQAPGQGPEWMGRVIPILGIANYAQKFQGRVTITADKFTTTAFMELRGLRSEDTAVYYCGNSRDGHKWGNYYGLDVWGQGTTVTVSS

SEQ ID NO: 17942 - protein, 121 aa, Artificial Sequence
  Synthetic polypeptide representing artificial human antibody VH domain
EVQLVESGGGLVKPGGSLRLSCAASGFTFSSYSMHWVRQAPGKGLEWVSSITSTSSYTKYADSMKGRFTISRDNAKNSLYLQMNSLRAEDTAVYYCARDSQSSGAHDFDYWGQGTLVTVSS

SEQ ID NO: 17943 - protein, 122 aa, Artificial Sequence
  Synthetic polypeptide representing artificial human antibody VH domain
QVQLQESGPGLVKPSETLSLTCTVSGGSISSYYWSWIRQPPGKGLEWIGYIYYSGSTNYNPSLKSRVTISVDTSKNQFSLKLSSVTAADTAVYYCARGRTIFGVVIEPFDYWGQGTLVTVSS

SEQ ID NO: 17944 - protein, 121 aa, Artificial Sequence
  Synthetic polypeptide representing artificial human antibody VH domain
QVQLVQSGAEVKKPGASVKVSCKASGYTFTSYDINWVRQATGQGLEWMGWMNPNSGNTGYAQKFQGRVTMTRNTSISTAYMELSSLRSEDTAVYYCARRRSGWSRYGMDVWGQGTTVTVSS

SEQ ID NO: 17945 - protein, 129 aa, Artificial Sequence
  Synthetic polypeptide representing artificial human antibody VH domain
EVQLVESGGGLVKPGGSLRLSCAASGFTFSSYSMNWVRQAPGKGLEWVSSISSSSSYIYYADSVKGRFTISRDNAKNSLYLQMNSLRAEDTAVYYCARDYYDYDSSGYLGYYYYYMDVWGKGTTVTVSS

SEQ ID NO: 17946 - protein, 127 aa, Artificial Sequence
  Synthetic polypeptide representing artificial human antibody VH domain
QVQLQQWGAGLLKPSETLSLTCAVYGGSFSGYYWSWIRQPPGKGLEWIGEINHSGSTNYNPSLKSRVTISVDTSKNQFSLKLSSVTAADTAVYYCARGRWRDTMIVVVIRDHAFDIWGQGTMVTVSS

SEQ ID NO: 17947 - protein, 126 aa, Artificial Sequence
  Synthetic polypeptide representing artificial human antibody VH domain
QVQLVQSGAEVKKPGASVKVSCKVSGYTLTELSMHWVRQAPGKGLEWMGGFDPEDGETIYAQKFQGRVTMTEDTSTDTAYMELSSLRSEDTAVYYCATGPVYCSSTSCKQNWFDPWGQGTLVTVSS

SEQ ID NO: 17948 - protein, 120 aa, Artificial Sequence
  Synthetic polypeptide representing artificial human antibody VH domain
QLQLQESGPGLVKPSETLSLTCTVSGGSISSSSYYWGWIRQPPGKGLEWIGSIYYSGSTYYNPSLKSRVTISVDTSKNQFSLKLSSVTAADTAVYYCARRQRSPRAFDIWGQGTMVTVSS

SEQ ID NO: 17949 - protein, 122 aa, Artificial Sequence
  Synthetic polypeptide representing artificial human antibody VH domain
QVQLQESGPGLVKPSQTLSLTCTVSGGSISSGSYYWSWIRQPAGKGLEWIGRIYTSGSTNYNPSLKSRVTISVDTSKNQFSLKLSSVTAADTAVYYCARGNAGYYYYYMDVWGKGTTVTVSS

SEQ ID NO: 17950 - protein, 124 aa, Artificial Sequence
  Synthetic polypeptide representing artificial human antibody VH domain
QVQLVQSGAEVKKPGASVKVSCKASGYTFTSYGISWVRQAPGQGLEWMGWISAYNGNTNYAQKLQGRVTMTTDTSTSTAYMELRSLRSDDTAVYYCARDAYYDILTGYYPFDYWGQGTLVTVSS

SEQ ID NO: 17951 - protein, 124 aa, Artificial Sequence
  Synthetic polypeptide representing artificial human antibody VH domain
EVQLLESGGDLVQPGGSLRLSCAASGFTFSNYVMNWVRQAPGKGLEWVSTITGSSDNTWYADSVKGRFTLSRDNSKNALYLQMNSLRVEDTAVYYCVRRSILPSSSVWGAFDCWGQGTLVTVSS

SEQ ID NO: 17952 - protein, 121 aa, Artificial Sequence
  Synthetic polypeptide representing artificial human antibody VH domain
QVQLVQSGAEVKKPGASVKVSCKVSGYTLTELSMHWVRQAPGKGLEWMGGFDPEDGETIYAQKFQGRVTMTEDTSTDTAYMELSSLRSEDTAVYYCASGPVVVTTSWFDPWGQGTLVTVSS

SEQ ID NO: 17953 - protein, 121 aa, Artificial Sequence
  Synthetic polypeptide representing artificial human antibody VH domain
QVQLVQSGAEVKKPGASVKVSCKASGYTFTSYDINWVRQATGQRPEWMGWVTPNSGNTGYAQKFHGRVTMTRDTSIRTAYMELSSLRSEDSAVYYCARAANQHGYGDLDYWGQGTLVTVSS

SEQ ID NO: 17954 - protein, 127 aa, Artificial Sequence
  Synthetic polypeptide representing artificial human antibody VH domain
QVQLQESGPGLVKPSQTLSLTCTVSGGSISSGSYYWSWIRQPAGKGLEWIGRIYTSGSTNYNPSLKSRVTISVDTSKNQFSLKLSSVTAADTAVYYCARAKKRWLQLGTEGDAFDIWGQGTMVTVSS

SEQ ID NO: 17955 - protein, 124 aa, Artificial Sequence
  Synthetic polypeptide representing artificial human antibody VH domain
QVTLKESGPVLVKPTETLTLTCTVSGFSLSNARMGVSWIRQPPGKALEWLAHIFSNDEKSYSTSLKSRLTISKDTSKSQVVLTMTNMDPVDTATYYCARILRDWLSYYYYMDVWGKGTTVTVSS

SEQ ID NO: 17956 - protein, 117 aa, Artificial Sequence
  Synthetic polypeptide representing artificial human antibody VH domain
QVHLVQSGAEVKKPGASVKVSCKASGYNFMNSGVTWVRQAPGQGLEWLGWISPYNGQTHYPQNIQGRVTMTTDTSTSTAYMDLKTLKSEDTAVYYCARQDGRDVDYWGQGTLVTVSS

SEQ ID NO: 17957 - protein, 123 aa, Artificial Sequence
  Synthetic polypeptide representing artificial human antibody VH domain
EVQLVESGGGLVQPGRSLRLSCAASGFTFDDYAMHWVRQAPGKGLEWVSGISWNSGSIGYADSVKGRFTISRDNAKNSLYLQMNSLRAEDTALYYCAKTIFPWAHYYYGMDVWGQGTTVTVSS

SEQ ID NO: 17958 - protein, 125 aa, Artificial Sequence
  Synthetic polypeptide representing artificial human antibody VH domain
QVTLKESGPVLVKPTETLTLTCTVSGFSLSNARMGVSWIRQPPGKALEWLAHIFSNDEKSYSTSLKSRLTISKDTSKSQVVLTMTNMDPVDTATYYCARTGRGWLQLIPSWFDPWGQGTLVTVSS

SEQ ID NO: 17959 - protein, 124 aa, Artificial Sequence
  Synthetic polypeptide representing artificial human antibody VH domain
QLQLQESGPGLVKPSETLSLTCTVSGGSISSSSYYWGWIRQPPGKGLEWIGSIYYSGSTYYNPSLKSRVTISVDTSKNQFSLKLSSVTAADTAVYYCARHAWNTLGRTNWFDPWGQGTLVTVSS

SEQ ID NO: 17960 - protein, 128 aa, Artificial Sequence
  Synthetic polypeptide representing artificial human antibody VH domain
QVQLQESGPGLVKPSQTLSLTCTVSGGSISSGSYYWSWIRQPAGKGLEWIGRIYTSGSTNYNPSLKSRVTISVDTSKNQFSLKLSSVTAADTAVYYCARGTHCSSTSCYAPYYYMDVWGKGTTVTVSS

SEQ ID NO: 17961 - protein, 125 aa, Artificial Sequence
  Synthetic polypeptide representing artificial human antibody VH domain
QVQLVQSGAEVKKPGASVKVSCKASGYTFTSYYMHWVRQAPGQGLEWMGIINPSGGSTSYAQKFQGRVTMTRDTSTSTVYMELSSLRSEDTAVYYCARGSIYSNPAGEGSFFDYWGQGTLVTVSS

SEQ ID NO: 17962 - protein, 123 aa, Artificial Sequence
  Synthetic polypeptide representing artificial human antibody VH domain
QVQLHQSGPGLVKPSQTLSLTCAISGDSVSSNSAAWNWIRQSPSRGLEWLGRTYYRSKWYNDYAVSVKSRITVNPDTSKNQFSLHLNSVTPEDTAVYYCAGHSSASHYYFDRWGQGTLVTVSS

SEQ ID NO: 17963 - protein, 125 aa, Artificial Sequence
  Synthetic polypeptide representing artificial human antibody VH domain
QVQLVQSGAEVKKPGASVKVSCKASGYTFTGYYMHWVRQAPGQGLEWMGWINPNSGGTNYAQKFQGRVTMTRDTSISTAYMELSRLRSDDTAVYYCARMFSDDSSVSYYYGMDVWGQGTTVTVSS

SEQ ID NO: 17964 - protein, 129 aa, Artificial Sequence
  Synthetic polypeptide representing artificial human antibody VH domain
QVQLEESGGGMVQPGKPLRLSCAASGFDFDTFGMHWVRQSPGRGLEWVALVSYDGRKENYADSVKGRFTISRDNSKNTLFLHMDSLRGEDTAIYYCAKDGVSYDFWSGYSGKYYYLDVWGRGTPVIVSS

SEQ ID NO: 17965 - protein, 132 aa, Artificial Sequence
  Synthetic polypeptide representing artificial human antibody VH domain
EVQLVESGGGLVQPGGSLRLSCVASGFSFRDNVMHWVRQTPGKGLQYISAISSDGGATYYEVSVTGRFTITRDNPKKTLFLQLTSLRAQDTGLYFCARGLRDAGRRKEIVGTPHHNYYIDIWGKGTMVTVSS

SEQ ID NO: 17966 - protein, 129 aa, Artificial Sequence
  Synthetic polypeptide representing artificial human antibody VH domain
QVQLQESGPGLVKPSQTLSLTCTVSGGSISSGGYYWSWIRQHPGKGLEWIGYIYYSGSTYYNPSLKSRVTISVDTSKNQFSLKLSSVTAADTAVYYCARAPPSSITIFGVVKSWYMDVWGKGTTVTVSS

SEQ ID NO: 17967 - protein, 121 aa, Artificial Sequence
  Synthetic polypeptide representing artificial human antibody VH domain
QVQLVQSGAEVKKPGASVKVSCKVSGYTLTELSMHWVRQAPGKGLEWMGGFDPEDGETIYAQKFQGRVTMTEDTSTDTAYMELSSLRSEDTAVYYCATGSPMVRGSWFDPWGQGTLVTVSS

SEQ ID NO: 17968 - protein, 128 aa, Artificial Sequence
  Synthetic polypeptide representing artificial human antibody VH domain
QVQLQESGPGLVKPSQTLSLTCTVSGGSISSGSYYWSWIRQPAGKGLEWIGRIYTSGSTNYNPSLKSRVTISVDTSKNQFSLKLSSVTAADTAVYYCARERGQRWLQLKDYYYYMDVWGKGTTVTVSS

SEQ ID NO: 17969 - protein, 119 aa, Artificial Sequence
  Synthetic polypeptide representing artificial human antibody VH domain
EVQLVESGGGFIKPGESLRLSCAASGFTFSNAWMTWVRQAPGKGLEWVGRIKSKTDGGTTDFAAPLKGRFTMSREDSKNTLYLQMNSLKIEDTAIYYCTTLSATYSHYWGQGTLVTVSS

SEQ ID NO: 17970 - protein, 122 aa, Artificial Sequence
  Synthetic polypeptide representing artificial human antibody VH domain
QVQVVQSGAEVKKSGASVKVSCKAFGDIFASEGITWVRQAPGQGLEWMGWISAYTGIAYYAQDFQGRVTMATDMSTNTAYMELRSLRSDDTAIYYCARGVILGVVINYMDVWGKGTTVTVSS

SEQ ID NO: 17971 - protein, 125 aa, Artificial Sequence
  Synthetic polypeptide representing artificial human antibody VH domain
QVQLVQSGAEVKKPGASLKVSCKVSGYSLSKLSIHWVRQAPGGGLEWMGGVDPEDDEIIYAQRFQGRVTLAEDTSTDTAYMELTSLRSEDTAVYYCLTDSDYYDGSGYIDGFDIWGQGTMVSVSS

SEQ ID NO: 17972 - protein, 122 aa, Artificial Sequence
  Synthetic polypeptide representing artificial human antibody VH domain
QVQLVQSGAEVKKPGASVKVSCKVSGYTLTELSMHWVRQAPGKGLEWMGGFDPEDGETIYAQKFQGRVTMTEDTSTDTAYMELSSLRSEDTAVYYCATSSPILTRTNWFDPWGQGTLVTVSS

SEQ ID NO: 17973 - protein, 118 aa, Artificial Sequence
  Synthetic polypeptide representing artificial human antibody VH domain
QVQLVESGGGVVQPGRSLRLSCAASGFTFSSYGMHWVRQAPGKGLEWVAVIWYDGSNKYYADSVKGRFTISRDNSKNTLYLQMNSLRAEDTAVYYCATLSSPPYFDYWGQGTLVTVSS

SEQ ID NO: 17974 - protein, 112 aa, Artificial Sequence
  Synthetic polypeptide representing artificial human antibody VH domain
QVQLQESGPGLVKPSETLSLTCTVSGGSISSYYWSWIRQPPGKGLEWIGYIYYSGSTNYNPSLKSRVTISVDTSKNQFSLKLSSVTAADTAVYYCARGFDYWGQGTLVTVSS

SEQ ID NO: 17975 - protein, 119 aa, Artificial Sequence
  Synthetic polypeptide representing artificial human antibody VH domain
EVQLLESGGRLVQPGGSLRLSCEVSGFTFSTYAMSWVRQAPGKGLEWVSGISGSGGATYYADSVKGRFTISRDNSKNTLFLQLRSLRVEDTALYYCAKEALFPTGLDHWGQGTLVTVSS

SEQ ID NO: 17976 - protein, 135 aa, Artificial Sequence
  Synthetic polypeptide representing artificial human antibody VH domain
QVQLVESGGGVVQPGRSLRLSCAASGFTFSSYGMHWVRQAPGKGLEWVAVIWYDGSNKYYADSVKGRFTISRDNSKNTLYLQMNSLRAEDTAVYYCAREHLYYDILTGYISPSRYYYYYYGMDVWGQGTTVTVSS

SEQ ID NO: 17977 - protein, 118 aa, Artificial Sequence
  Synthetic polypeptide representing artificial human antibody VH domain
EVQLVESGGGLVQPGGSLRLSCAASGLTVSSNYMSWVRQAPGKGLEWVSVIYSGGSTYYADSVKGRFTISRHNSKNTLYLQMNSLRAEDTAVYYCARDLEVVGGMDVWGQGTTVTVSS

SEQ ID NO: 17978 - protein, 124 aa, Artificial Sequence
  Synthetic polypeptide representing artificial human antibody VH domain
QVQLVQSGAEVKKPGASVKVSCKASGYTFTGYYMHWVRQAPGQGLEWMGWINPNSGGTNYAQKFQGRVTMTRDTSISTAYMELSRLRSDDTAVYYCARGRKIVVPNGLYGMDVWGQGTTVTVSS

SEQ ID NO: 17979 - protein, 119 aa, Artificial Sequence
  Synthetic polypeptide representing artificial human antibody VH domain
EVQLVESGGGLVQPGGSLRLSCAASGFTVSSNYMSWVRQAPGKGLEWVSVIYSGGSTYYADSVKGRFTISRDNSKNTLYLQMNSLRAEDTAVYYCAREHSSGRGGFDYWGQGTLVTVSS

SEQ ID NO: 17980 - protein, 118 aa, Artificial Sequence
  Synthetic polypeptide representing artificial human antibody VH domain
EVQLVESGGGLVKPGESLSLSCAASGFIFSNAWMIWVRQAPGKGLEWVGRIKSKTDGGTIDYAAPVKGRFTMSRDDSKNMLYLQMNSLKTEDTAVYYCTTGGGYLTYWGQGTLVTVFS

SEQ ID NO: 17981 - protein, 129 aa, Artificial Sequence
  Synthetic polypeptide representing artificial human antibody VH domain
EVQLVESGGGLVKPGGSLRLSCAASGFTFSSYSMNWVRQAPGKGLEWVSSISSSSSYIYYADSVKGRFTISRDNAKNSLYLQMNSLRAEDTAVYYCARGGYSYGHDTDLLYYYYGMDVWGQGTTVTVSS

SEQ ID NO: 17982 - protein, 129 aa, Artificial Sequence
  Synthetic polypeptide representing artificial human antibody VH domain
EVQLLESGGGLVQPGGSLRLSCAASGFTFSSYAMSWVRQAPGKGLEWVSAISGSGGSTYYADSVKGRFTISRDNSKNTLYLQMNSLRAEDTAVYYCAKEGRPINGYYDILTDPYYFEYWGQGTLVTVSS

SEQ ID NO: 17983 - protein, 131 aa, Artificial Sequence
  Synthetic polypeptide representing artificial human antibody VH domain
QVQLVQSGAEVKKPGASVKVSCKASGYTFTGYYMHWVRQAPGQGLEWMGWINPNSGGTNYAQKFQGRVTMTRDTSISTAYMELSRLRSDDTAVYYCARGELLRYFDWLSHEPDYYYGMDVWGQGTTVTVSS

SEQ ID NO: 17984 - protein, 120 aa, Artificial Sequence
  Synthetic polypeptide representing artificial human antibody VH domain
QVQLVQSGAEVKKPGASVKVSCKASGYTFTSYGISWVRQAPGQGLEWMGWISAYNGNTNYAQKLQGRVTMTTDTSTSTAYMELRSLRSDDTAVYYCARTTMGIAEYFDYWGQGTLVTVSS

SEQ ID NO: 17985 - protein, 127 aa, Artificial Sequence
  Synthetic polypeptide representing artificial human antibody VH domain
QVQLVESGGGVVQPGRSLRLSCAASGFTFSSYGMHWVRQAPGKGLEWVAVISYDGSNKYYADSVKGRFTISRDNSKNTLYLQMNSLRAEDTAVYYCAKDPEGYSSGWIYYYYGMDVWGQGTTVTVSS

SEQ ID NO: 17986 - protein, 118 aa, Artificial Sequence
  Synthetic polypeptide representing artificial human antibody VH domain
QVQLVESGGGVVQPGRSLRLSCAASGFTFSSYAMHWVRQAPGKGLEWVAVISYDGSNKYYADSVKGRFTISRDNSKNTLYLQMNSLRAEDTAVYYCARNGGTNWFDPWGQGTLVTVSS

SEQ ID NO: 17987 - protein, 128 aa, Artificial Sequence
  Synthetic polypeptide representing artificial human antibody VH domain
QVQLVQSGAEVKKPGASVKVSCKVSGYTLTELSMHWVRQAPGKGLEWMGGFDPEDGETIYAQKFQGRVTMTEDTSTDTAYMELSSLRSEDTAVYYCATGIAVAGTPTRYYYYYGMDVWGQGTTVTVSS

SEQ ID NO: 17988 - protein, 127 aa, Artificial Sequence
  Synthetic polypeptide representing artificial human antibody VH domain
QVQLVESGGGVVQPGRSLRLSCAASGFTFSSYGMHWVRQAPGKGLEWVAVISYDGSNKYYADSVKGRFTISRDNSKNTLYLQMNSLRAEDTAVYYCAKSEYFDWLLYSDYYYGMDVWGQGTTVTVSS

SEQ ID NO: 17989 - protein, 119 aa, Artificial Sequence
  Synthetic polypeptide representing artificial human antibody VH domain
QVTLRESGPALVKPTQTLTLTCTFSGFSLSTSGMCVSWIRQPPGKALEWLALIDWDDDKYYSTSLKTRLTISKDTSKNQVVLTMTNMDPVDTATYYCARGDFDWLLDYWGQGTLVTVSS

SEQ ID NO: 17990 - protein, 121 aa, Artificial Sequence
  Synthetic polypeptide representing artificial human antibody VH domain
QVHLQESGPGLVKPSQTLSLTCTVSGASISSDDYYWSWIRLSPGKGLEWLGYIHHSGNTFYSPSLKRRLSVSLDMSQNQFSMRLISVTAADTAIYYCAREKWTSFRFLENWGQGALVTVSS

SEQ ID NO: 17991 - protein, 125 aa, Artificial Sequence
  Synthetic polypeptide representing artificial human antibody VH domain
QVQLVESGGGVVQPGRSLRLSCAASGFTFSSYGMHWVRQAPGKGLEWVAVISYDGSNKYYADSVKGRFTISRDNSKNTLYLQMNSLRAEDTAVYYCATTVTTPHDYYYYYGMDVWGQGTTVTVSS

SEQ ID NO: 17992 - protein, 118 aa, Artificial Sequence
  Synthetic polypeptide representing artificial human antibody VH domain
EVQLVQSGAEVKKPGESLRISCKGSGYSFTSYWISWVRQMPGKGLEWMGRIDPSDSYTNYSPSFQGHVTISADKSISTAYLQWSSLKASDTAMYYCARSAVPYYFDYWGQGTLVTVSS

SEQ ID NO: 17993 - protein, 125 aa, Artificial Sequence
  Synthetic polypeptide representing artificial human antibody VH domain
QVQLQESGPGLVKPSETLSLTCSVSGGSMSRYYWSWIRQPAGKGLELIGRVYSTGTTNYNPSLKSRVTMSVDTSKNQFSLKLNSVTAADTAVYFCARGVAETYSGDYWLVLFDYWGQGSRVTVSS

SEQ ID NO: 17994 - protein, 130 aa, Artificial Sequence
  Synthetic polypeptide representing artificial human antibody VH domain
EVQLVESGGGLVKPGRSLRLSCTASGFTFGDYAMSWFRQAPGKGLEWVGFIRSKAYGGTTEYAASVKGRFTISRDDSKSIAYLQMNSLKTEDTAVYYCTRVREQGEYSSSPGLEGWFDPWGQGTLVTVSS

SEQ ID NO: 17995 - protein, 121 aa, Artificial Sequence
  Synthetic polypeptide representing artificial human antibody VH domain
QVQLVQSGAEVKKPGSSVKVSCKASGGTFSSYAISWVRQAPGQGLEWMGRIIPILGIANYAQKFQGRVTITADKSTSTAYMELSSLRSEDTAVYYCARRYCSGGSCYKDYWGQGTLVTVSS

SEQ ID NO: 17996 - protein, 122 aa, Artificial Sequence
  Synthetic polypeptide representing artificial human antibody VH domain
QVQLVESGGGVVQPGRSLRLSCAASGFTFSSYGMHWVRQAPGKGLEWVAVIWYDGSNKYYADSVKGRFTISRDNSKNTLYLQMNSLRAEDTAVYYCARGDYYGSGSNDFDYWGQGTLVTVSS

SEQ ID NO: 17997 - protein, 127 aa, Artificial Sequence
  Synthetic polypeptide representing artificial human antibody VH domain
QVQLVQSGAEVKKPGASVKVSCKASGYTFTSYDINWVRQATGQGLEWMGWMNPNSGNTGYAQKFQGRVTMTRNTSISTAYMELSSLRSEDTAVYYCARGLRRAGSIVVVSLYYFDYWGQGTLVTVSS

SEQ ID NO: 17998 - protein, 125 aa, Artificial Sequence
  Synthetic polypeptide representing artificial human antibody VH domain
QVHLVQSGAEVKKPGSSVKVSCKSSGGSFNTYAISWVRQAPGQGLEWMGRIIPIIGTGEYAQKFRGRLTITADKSTSTASMELSSLRSEDTAVYYCARDGGPEAGSDYYHGLEDWGQGTTVTVSS

SEQ ID NO: 17999 - protein, 131 aa, Artificial Sequence
  Synthetic polypeptide representing artificial human antibody VH domain
EVQLVESGGGLVQPGGSLRLSCAASGFSFNNYNMNWVRQAPGRGLEWVSYISSTSNTIYYADSVKGRFTISRDNAKNSLHLQMNSLSDEDTAVYYCARDPGRAQTVWWHTVATITGYFDYWGQGALVTVSS

SEQ ID NO: 18000 - protein, 121 aa, Artificial Sequence
  Synthetic polypeptide representing artificial human antibody VH domain
QVQLVESGGGVVQPGRSLRLSCAASGFTFSSYAMHWVRQAPGKGLEWVAVISYDGSNKYYADSVKGRFTISRDNSKNTLYLQMNSLRAEDTAVYYCARAYSGSYYYGMDVWGQGTTVTVSS

SEQ ID NO: 18001 - protein, 126 aa, Artificial Sequence
  Synthetic polypeptide representing artificial human antibody VH domain
EVQLLESGGGLVQPGGSLRLSCAASGFTFSSYAMSWVRQAPGKGLEWVSAISGSGGSTYYADSVKGRFTISRDNSKNTLYLQMNSLRAEDTAVYYCAKDHNVLLWFGELTAGVDVWGQGTTVTVSS

SEQ ID NO: 18002 - protein, 123 aa, Artificial Sequence
  Synthetic polypeptide representing artificial human antibody VH domain
EVQLVESGGGLVKPGGSLRLSCAASGFTFSNAWMSWVRQAPGKGLEWVGRIKSKTDGGTTDYAAPVKGRFTISRDDSKNTLYLQMNSLKTEDTAVYYCTTRRWFRELLKNDYWGQGTLVTVSS

SEQ ID NO: 18003 - protein, 124 aa, Artificial Sequence
  Synthetic polypeptide representing artificial human antibody VH domain
QVQLQESGPGLVKPSETLSLTCTVSGGSVSSGSYYWSWIRQPPGKGLEWIGYIYYSGSTNYNPSLKSRVTISVDTSKNQFSLKLSSVTAADTAVYYCAREPVVSQLYSYGMDVWGQGTTVTVSS

SEQ ID NO: 18004 - protein, 118 aa, Artificial Sequence
  Synthetic polypeptide representing artificial human antibody VH domain
QVQLVESGGGVVQPGRSLRLSCAASGFTFSSYGMHWVRQAPGKGLEWVAVISYDGSNKYYADSVKGRFTISRDNSKNTLYLQMNSLRAEDTAVYYCASISSGWYSDYWGQGTLVTVSS

SEQ ID NO: 18005 - protein, 118 aa, Artificial Sequence
  Synthetic polypeptide representing artificial human antibody VH domain
QVQLVESGGGVVQPGRSLRLSCAASGFTFSSYAMHWVRQAPGKGLEWVAVISYDGSNKYYADSVKGRFTISRDNSKNTLYLQMNSLRAEDTAVYYCARNGDSNYFDYWGQGTLVTVSS

SEQ ID NO: 18006 - protein, 134 aa, Artificial Sequence
  Synthetic polypeptide representing artificial human antibody VH domain
EVQLVESGGGLVQPGGSLRLSCAASGFTFSSYDMHWVRQATGKGLEWVSAIGTAGDTYYPGSVKGRFTISRENAKNSLYLQMNSLRAGDTAVYYCARAQTTWAGSYDYVWGSYRQTKGDAFDIWGQGTMVTVSS

SEQ ID NO: 18007 - protein, 116 aa, Artificial Sequence
  Synthetic polypeptide representing artificial human antibody VH domain
EVQLLESGGGLVQPGGSLRLSCAASGFTFSSYAMSWVRQAPGKGLEWVSAISGSGGSTYYADSVKGRFTISRDNSKNTLYLQMNSLRAEDTAVYYCASRWLQLGYWGQGTLVTVSS

SEQ ID NO: 18008 - protein, 124 aa, Artificial Sequence
  Synthetic polypeptide representing artificial human antibody VH domain
QLQVEESGSGLTKPSETLYLTCTVSGASVRGGGYSWSWLRKSPGSGLEWIGFIYPPASYYNPSLRSRATISAGPAFNQVSLTLTSVSAADAGVYYCAVGGGYCHGGTCGWFAPWGHGIMVAVSS

SEQ ID NO: 18009 - protein, 119 aa, Artificial Sequence
  Synthetic polypeptide representing artificial human antibody VH domain
EVQLVESGGGLVKPGGSLRLSCAASGFTFSSYSMNWVRQAPGKGLEWVSSISSSSSYIYYADSVKGRFTISRDNAKNSLYLQMNSLRAEDTAVYYCARDWSRGYGMDVWGQGTTVTVSS

SEQ ID NO: 18010 - protein, 114 aa, Artificial Sequence
  Synthetic polypeptide representing artificial human antibody VH domain
EVQLEESGGGLVQPGGSLRLSCAASGFAVSSIYMSWVRQAPGKGLEWVSIFYSDGATKYADSVKGRFTISRDNSDNTVYLHMNSLRVEDTAIYFCARDLHFDIWGRGTLVTVSS

SEQ ID NO: 18011 - protein, 133 aa, Artificial Sequence
  Synthetic polypeptide representing artificial human antibody VH domain
EVQLVESGGGLVQPGGSLRLSCAASQFTFSHYEMSWVRQAPGKGLEWVAYISQSGSTLYHADAVRGRFTVSRDNAENSLFLQMNSLSVEDTATYYCVRALLGGTRDYDISTGHYNEGYYFDYWGQGTLVTVAS

SEQ ID NO: 18012 - protein, 124 aa, Artificial Sequence
  Synthetic polypeptide representing artificial human antibody VH domain
EVQLVESGGGVVQPGGSLRLSCAASGFTFDDYAMHWVRQAPGKGLEWVSLISGDGGSTYYADSVKGRFTISRDNSKNSLYLQMNSLRTEDTALYYCAKDIGADVLLWFGAWDYWGQGTLVTVSS

SEQ ID NO: 18013 - protein, 126 aa, Artificial Sequence
  Synthetic polypeptide representing artificial human antibody VH domain
QVTLRESGPALVKPTQTLTLTCTFSGFSLSTSGMCVSWIRQPPGKALEWLALIDWDDDKYYSTSLKTRLTISKDTSKNQVVLTMTNMDPVDTATYYCARIWYSSGWYEPKYYFDYWGQGTLVTVSS

SEQ ID NO: 18014 - protein, 121 aa, Artificial Sequence
  Synthetic polypeptide representing artificial human antibody VH domain
EVQLLESGGGLVQPGGSLRLSCAASGFTFQNYVMSWVRQAPGQGLEWVSVVYHGGARTYYTDSVKGRFTISRDDSKNTLYLQMNSLRAEDTAVYYCAKDRDEYGDYAFDCWGQGTLVTVSS

SEQ ID NO: 18015 - protein, 124 aa, Artificial Sequence
  Synthetic polypeptide representing artificial human antibody VH domain
QVQLKQSGPGLVKPSQTLSLTCAISWDSVSTKEATWNWIRQSPSRGLEWLGRTYYNSKWFQDYALSVKSRIIINSDTSKNQFSLQLNSVTPEDTAVYYCAREPQYDIMGGFAQWSQGTLVTVSS

SEQ ID NO: 18016 - protein, 132 aa, Artificial Sequence
  Synthetic polypeptide representing artificial human antibody VH domain
QVQLVESGGGVVQPGRSLRLSCAASGFTFSSYGMHWVRQAPGKGLEWVAVIWYDGSNKYYADSVKGRFTISRDNSKNTLYLQMNSLRAEDTAVYYCARSTYYYDSSGYYYPYYYYYYGMDVWGQGTTVTVSS

SEQ ID NO: 18017 - protein, 126 aa, Artificial Sequence
  Synthetic polypeptide representing artificial human antibody VH domain
QVTLRESGPALVKPTQTLTLTCTFSGFSLSTSGMCVSWIRQPPGKALEWLARIDWDDDKYYSTSLKTRLTISKDTSKNQVVLTMTNMDPVDTATYYCARDTYDILTGYGPLLMDVWGQGTTVTVSS

SEQ ID NO: 18018 - protein, 129 aa, Artificial Sequence
  Synthetic polypeptide representing artificial human antibody VH domain
QVQLVQSGAEVKKPGASVKVSCKASGYTFTSYGISWVRQAPGQGLEWMGWISAYNGNTNYAQKLQGRVTMTTDTSTSTAYMELRSLRSDDTAVYYCARNPPYYDILTGYSLDYYGMDVWGQGTTVTVSS

SEQ ID NO: 18019 - protein, 121 aa, Artificial Sequence
  Synthetic polypeptide representing artificial human antibody VH domain
QVQLVESGGGVVQPGRSLRLSCAASGFTFSSYAMHWVRQAPGKGLEWVAVISYDGSNKYYADSVKGRFTISRDNSKNTLYLQMNSLRAEDTAVYYCARTYSGSYKGYFDYWGQGTLVTVSS

SEQ ID NO: 18020 - protein, 135 aa, Artificial Sequence
  Synthetic polypeptide representing artificial human antibody VH domain
QVQLVESGGGVVQPGRSLRLSCAASGFTFSSYAMHWVRQAPGKGLEWVAVISYDGSNKYYADSVKGRFTISRDNSKNTLYLQMNSLRAEDTAVYYCARDTKYYDFWSGYLGRETTYYYYYGMDVWGQGTTVTVSS

SEQ ID NO: 18021 - protein, 124 aa, Artificial Sequence
  Synthetic polypeptide representing artificial human antibody VH domain
EVQLVQSGAEVKKPGESLKISCKGSGYSFTSYWIGWVRQMPGKGLEWMGIIYPGDSDTRYSPSFQGQVTISADKSISTAYLQWSSLKASDTAMYYCARSWDSSSWWLTNWFDPWGQGTLVTVSS

SEQ ID NO: 18022 - protein, 125 aa, Artificial Sequence
  Synthetic polypeptide representing artificial human antibody VH domain
QVQLVESGGGVVQPGRSLRLSCAASGFTFSSYAMHWVRQAPGKGLEWVAVISYDGSNKYYADSVKGRFTISRDNSKNTLYLQMNSLRAEDTAVYYCVRDYDDYGDYGESYYFDYWGQGTLVTVSS

SEQ ID NO: 18023 - protein, 121 aa, Artificial Sequence
  Synthetic polypeptide representing artificial human antibody VH domain
EVQLVQSGAEVKKPGESLRISCKGSGYSFTSYWISWVRQMPGKGLEWMGRIDPSDSYTNYSPSFQGHVTISADKSISTAYLQWSSLKASDTAMYYCARHQGGSPFGGMDVWGQGTTVTVSS

SEQ ID NO: 18024 - protein, 125 aa, Artificial Sequence
  Synthetic polypeptide representing artificial human antibody VH domain
QVQLQESGPGLVKPSETLSLTCTVSGGSISSYYWSWIRQPPGKGLEWIGYIYYSGSTNYNPSLKSRVTISVDTSKNQFSLKLSSVTAADTAVYYCARYDILTGYYMGSGRWFDPWGQGTLVTVSS

SEQ ID NO: 18025 - protein, 124 aa, Artificial Sequence
  Synthetic polypeptide representing artificial human antibody VH domain
EVQLVESGGGLVKPGGSLRLSCAASGFTFSSYSMNWVRQAPGKGLEWVSSISSSSSYIYYADSVKGRFTISRDNAKNSLYLQMNSLRAEDTAVYYCARGSMGGFTMIVVALSHWGQGTLVTVSS

SEQ ID NO: 18026 - protein, 122 aa, Artificial Sequence
  Synthetic polypeptide representing artificial human antibody VH domain
QVQLVQSGAEVKKPGASVKVSCKVSGYTLTELSMHWVRQAPGKGLEWMGGFDPEDGETIYAQKFQGRVTMTEDTSTDTAYMELSSLRSEDTAVYYCATDRDLYGGNHCFDIWGQGTMVTVSS

SEQ ID NO: 18027 - protein, 119 aa, Artificial Sequence
  Synthetic polypeptide representing artificial human antibody VH domain
EVQLVDSGGGLVQPGGSLRLSCVASGFTFSSRWMSWVRQAPGKGLEWVANINEDGNVIGYADSVRGRFTISRDNAKNSLFLQMNSLSDGDTAVYFCTSVFGAYDVCDYWGQGTRVTVSS

SEQ ID NO: 18028 - protein, 124 aa, Artificial Sequence
  Synthetic polypeptide representing artificial human antibody VH domain
QVQLQESGPGLVKPSQTLSLTCTVSGGSISSGGYYWSWIRQHPGKGLEWIGYIYYSGSTYYNPSLKSRVTISVDTSKNQFSLKLSSVTAADTAVYYCARAGFDGAVAPEGFDPWGQGTLVTVSS

SEQ ID NO: 18029 - protein, 119 aa, Artificial Sequence
  Synthetic polypeptide representing artificial human antibody VH domain
QVQLVQSGAEVKKPGASVKVSCKVSGYTLTELSMHWVRQAPGKGLEWMGGFDPEDGETIYAQKFQGRVTMTEDTSTDTAYMELSSLRSEDTAVYYCATFSSYVGRADYWGQGTLVTVSS

SEQ ID NO: 18030 - protein, 124 aa, Artificial Sequence
  Synthetic polypeptide representing artificial human antibody VH domain
EVQLVQSGAEVKESGESLKISCKASGYSFPSYWIGWVRQMPGKGLEWMGIIYPGDSNPTYSPSFEGQVIISADKSINTAYLQWISLRASDTAMYFCARVRKRFGDIVGDAFDIWGQGTMVTVAS

SEQ ID NO: 18031 - protein, 117 aa, Artificial Sequence
  Synthetic polypeptide representing artificial human antibody VH domain
QVQLVESGGGVVQPGRSLRLSCAASGFTFSSYGMHWVRQAPGKGLEWVAVISYDGSNKYYADSVKGRFTISRDNSKNTLYLQMNSLRAEDTAVYYCAKGVEYYSDYWGQGTLVTVSS

SEQ ID NO: 18032 - protein, 120 aa, Artificial Sequence
  Synthetic polypeptide representing artificial human antibody VH domain
QVQLQESGPGLVKPSETLSLTCTVSGGSISSYYWSWIRQPPGKGLEWIGYIYYSGSTNYNPSLKSRVTISVDTSKNQFSLKLSSVTAADTAVYYCARRGYYYGSVGFDPWGQGTLVTVSS

SEQ ID NO: 18033 - protein, 128 aa, Artificial Sequence
  Synthetic polypeptide representing artificial human antibody VH domain
QVQLVESGGGVVQPGRSLRLSCAASGFTFSSYGMHWVRQAPGKGLEWVAVISYDGSNKYYADSVKGRFTISRDNSKNTLYLQMNSLRAEDTAVYYCAKPSFGLSGWFDFYYYYGMDVWGQGTTVTVSS

SEQ ID NO: 18034 - protein, 122 aa, Artificial Sequence
  Synthetic polypeptide representing artificial human antibody VH domain
EVQLLESGGGLVQPGGSLRLSCAASGFTFSSYAMSWVRQAPGKGLEWVSAISGSGGSTYYADSVKGRFTISRDNSKNTLYLQMNSLRAEDTAVYYCAKVVGEPKGANWFDPWGQGTLVTVSS

SEQ ID NO: 18035 - protein, 123 aa, Artificial Sequence
  Synthetic polypeptide representing artificial human antibody VH domain
EVQLVESGGGLVKPGGSLRLSCAASGFTFSNAWMSWVRQAPGKGLEWVGRIKSKTDGGTTDYAAPVKGRFTISRDDSKNTLYLQMNSLKTEDTAVYYCTTDSASIGYYGMDVWGQGTTVTVSS

SEQ ID NO: 18036 - protein, 121 aa, Artificial Sequence
  Synthetic polypeptide representing artificial human antibody VH domain
QVQLVQSGAEVKKPGASVKVSCKVSGYTLTELSMHWVRQAPGKGLEWMGGFDPEDGETIYAQKFQGRVTMTEDTSTDTAYMELSSLRSEDTAVYYCATGPPYGDRNWFDPWGQGTLVTVSS

SEQ ID NO: 18037 - protein, 130 aa, Artificial Sequence
  Synthetic polypeptide representing artificial human antibody VH domain
QVQLVQSGAEVKKPGASVKVSCKVSGYTLTELSMHWVRQAPGKGLEWMGGFDPEDGETIYAQKFQGRVTMTEDTSTDTAYMELSSLRSEDTAVYYCATGVSAYYDSRDGTYYYYYGMDVWGQGTTVTVSS

SEQ ID NO: 18038 - protein, 130 aa, Artificial Sequence
  Synthetic polypeptide representing artificial human antibody VH domain
QVQLVQSGAEVKKPGASVKVSCKASGYTFTSYGISWVRQAPGQGLEWMGWISAYNGNTNYAQKLQGRVTMTTDTSTSTAYMELRSLRSDDTAVYYCARGCGGDCYSPWGFYYYYYGMDVWGQGTTVTVSS

SEQ ID NO: 18039 - protein, 126 aa, Artificial Sequence
  Synthetic polypeptide representing artificial human antibody VH domain
EVQLLESGGGLVQPGESLRLSCAASGFTFSSYDMTWVRQAPGKGLEWVSAISGSGGGTYYADSVKGRFTISRDNSKNTLYLQMNSLRAEDTAVYYCAKGVGYYDFWSGQGDGMDVWGQGTTVTVSS

SEQ ID NO: 18040 - protein, 127 aa, Artificial Sequence
  Synthetic polypeptide representing artificial human antibody VH domain
QVQLQESGPGLVKPSETLSLTCTVSGGSVSSGSYYWSWIRQPPGKGLEWIGYIYYSGSTNYNPSLKSRVTISVDTSKNQFSLKLSSVTAADTAVYYCAREPLRITMIVVERGGLDPWGQGTLVTVSS

SEQ ID NO: 18041 - protein, 129 aa, Artificial Sequence
  Synthetic polypeptide representing artificial human antibody VH domain
QVQLVQSGAEVKKPGASVKVSCKASGYTFTSYAMHWVRQAPGQRLEWMGWINAGNGNTKYSQKFQGRVTITRDTSASTAYMELSSLRSEDTAVYYCARRRITIFGVVIIDNRGDWFDPWGQGTLVTVSS

SEQ ID NO: 18042 - protein, 124 aa, Artificial Sequence
  Synthetic polypeptide representing artificial human antibody VH domain
QVQLVESGGGVVQPGRSLRLSCAASGFTFSSYAMHWVRQAPGKGLEWVAVISYDGSNKYYADSVKGRFTISRDNSKNTLYLQMNSLRAEDTAVYYCAIPPLAAQNYYYYGMDVWGQGTTVTVSS

SEQ ID NO: 18043 - protein, 127 aa, Artificial Sequence
  Synthetic polypeptide representing artificial human antibody VH domain
QVQLVESGGGVVQPGRSLRLSCAASGFTFSSYGMHWVRQAPGKGLEWVAVISYDGSNKYYADSVKGRFTISRDNSKNTLYLQMNSLRAEDTAVYYCAKDRPYCSGGSCQAYGWFDPWGQGTLVTVSS

SEQ ID NO: 18044 - protein, 125 aa, Artificial Sequence
  Synthetic polypeptide representing artificial human antibody VH domain
QVQLVQSGAEVKKPGASVKVSCKASGYTFTSYYMHWVRQAPGQGLEWMGIINPSGGSTSYAQKFQGRVTMTRDTSTSTVYMELSSLRSEDTAVYYCAREESYGDYPWSTRGMDVWGQGTTVTVSS

SEQ ID NO: 18045 - protein, 133 aa, Artificial Sequence
  Synthetic polypeptide representing artificial human antibody VH domain
QVQLVESGGGVVQPGRSLRLSCAASGFTFSSYAMHWVRQAPGKGLEWVAVISYDGSNKYYADSVKGRFTISRDNSKNTLYLQMNSLRAEDTAVYYCARDVVATGEGITMIWGVYYYYYGMDVWGQGTTVTVSS

SEQ ID NO: 18046 - protein, 122 aa, Artificial Sequence
  Synthetic polypeptide representing artificial human antibody VH domain
QVQLVQSGAEVKKPGASVKVSCKASGYTFTSYYMHWVRQAPGQGLEWMGIINPSGGSTSYAQKFQGRVTMTRDTSTSTVYMELSSLRSEDTAVYYCARESDSSGYHGWFDPWGQGTLVTVSS

SEQ ID NO: 18047 - protein, 120 aa, Artificial Sequence
  Synthetic polypeptide representing artificial human antibody VH domain
QVQLQESGPGLVKPSETLSLTCTVSDDSISSKNWWSWVRQPPGKGLEWIGEISHSGNTKYNPSLRSRVSISVDKSKNQFSLELDSVTAADTAVYYCARVSNWNYGPLDYWGQGTLVTVSS

SEQ ID NO: 18048 - protein, 123 aa, Artificial Sequence
  Synthetic polypeptide representing artificial human antibody VH domain
QLQLQESGPGLVKPSETLSLTCTVSGGSISSSSYYWGWIRQPPGKGLEWIGSIYYSGSTYYNPSLKSRVTISVDTSKNQFSLKLSSVTAADTAVYYCARHQTYYGDYGGVDYWGQGTLVTVSS

SEQ ID NO: 18049 - protein, 118 aa, Artificial Sequence
  Synthetic polypeptide representing artificial human antibody VH domain
EVQLVQSGAEVKKPGESLKISCQGSGYRFTSYWIGWVRQMPGKGLEWMGIIYPGDSDTRYSPSFQGQVTISADKSISTAYLQWSSLRASDTAMYYCAIHDYGDYVGYWGQGTLVTVSS

SEQ ID NO: 18050 - protein, 123 aa, Artificial Sequence
  Synthetic polypeptide representing artificial human antibody VH domain
QVQLMESGGGVVQPGGSLRLTCAASGFIFEDYSIHWVRQTPGKGPEWVAVITDDGDIASYADSVQGRFIMSRDNSNGTVYLHMKDLRVEDTAIYYCVRDRHGGSYYWEYFQFWGQGTLVTVSA

SEQ ID NO: 18051 - protein, 123 aa, Artificial Sequence
  Synthetic polypeptide representing artificial human antibody VH domain
QVQLQESGPGLVKPSQTLSLTCIVSGDSISSGGYYWSWIRQHPVKGLEWIGYIYNTGITYYNPSLESRVTISLDTSKNQFSLKLSSVTAADTAVYYCARGNGNSPSSYPYSPWGQGTLVTVSS

SEQ ID NO: 18052 - protein, 118 aa, Artificial Sequence
  Synthetic polypeptide representing artificial human antibody VH domain
QVQLQASGPGLVQPSETLSLTCTVSDTSLRSYSLSWIRQFAGERWEWIGFVSDNGRIAYNPSLDGRVVISVDTSKNQFSLKLASVTAADTAVYYCARPNWGDFAFDIWSRGTVVTVSS

SEQ ID NO: 18053 - protein, 129 aa, Artificial Sequence
  Synthetic polypeptide representing artificial human antibody VH domain
EVQLVESGGGVVQPGGSLRLSCAASGFTFDDYAMHWVRQAPGKGLEWVSLISGDGGSTYYADSVKGRFTISRDNSKNSLYLQMNSLRTEDTALYYCAKDKRGPLYGDYGVYYYYGMDVWGQGTTVTVSS

SEQ ID NO: 18054 - protein, 132 aa, Artificial Sequence
  Synthetic polypeptide representing artificial human antibody VH domain
QVQLQESGPGLVKPSQTLSLTCTVSGGSISSGGYYWSWIRQHPGKGLEWIGYIYYSGSTYYNPSLKSRVTISVDTSKNQFSLKLSSVTAADTAVYYCARNGGGGGPQMITFGGVIGPFFDYWGQGTLVTVSS

SEQ ID NO: 18055 - protein, 121 aa, Artificial Sequence
  Synthetic polypeptide representing artificial human antibody VH domain
QVQLQESGPGLVQPSETLSLTCTISGGSMSSYYWSWIRQPPGKRLEWIGYIYDSGITNYNPSLRSRVSISVDTSKNQFSLNLRSVTAADTAFYYCARVDYHSSGPVARDIWGQGTMVTVSS

SEQ ID NO: 18056 - protein, 131 aa, Artificial Sequence
  Synthetic polypeptide representing artificial human antibody VH domain
QVQLVESGGGVVQPGRSLRLSCAASGFTFSSYAMHWVRQAPGKGLEWVAVISYDGSNKYYADSVKGRFTISRDNSKNTLYLQMNSLRAEDTAVYYCARDLSYGDYVWETLGGYYYYGMDVWGQGTTVTVSS

SEQ ID NO: 18057 - protein, 129 aa, Artificial Sequence
  Synthetic polypeptide representing artificial human antibody VH domain
EVQLLESGGGLVQPGGSLRLSCAASGFTFSSYAMSWVRQAPGKGLEWVSAISGSGGSTYYADSVKGRFTISRDNSKNTLYLQMNSLRAEDTAVYYCAKEGRPINGYYDILTDPYYFDYWGQGTLVTVSS

SEQ ID NO: 18058 - protein, 120 aa, Artificial Sequence; identical to SEQ ID NO: 18032
  Synthetic polypeptide representing artificial human antibody VH domain

SEQ ID NO: 18059 - protein, 119 aa, Artificial Sequence
  Synthetic polypeptide representing artificial human antibody VH domain
EVQLVESGGGLIQPGGSLRLSCAASGFTVSSNYMSWVRQAPGKGLEWVSVIYSGGSTYYADSVKGRFTISRDNSKNTLYLQMNSLRAEDTAVYYCARGDWGIAVAGTKWGQGTLVTVSS

SEQ ID NO: 18060 - protein, 116 aa, Artificial Sequence
  Synthetic polypeptide representing artificial human antibody VH domain
EVHLVESGGGLAKPGEPLRLSCAASGFVFTGAWMSWVRQAPGKGLEWVGRVMTKADGGTTDYAAPVKGRFTISRDDSQNTLYLHMNSLKTEDTAVYYCTAGFGDAWGQGTTVTVSS

SEQ ID NO: 18061 - protein, 124 aa, Artificial Sequence
  Synthetic polypeptide representing artificial human antibody VH domain
EVQLVESGGALVQPGGSLRLSCAASGFIFSSYEMNWVRQTPGKGLEWISYISGSGSSIYYADSVRGRFIISRDNARKSLYLQMNSLRAADTAIYYCARGDVWGGTIPQDAFDMWGQGTTVVVSS

SEQ ID NO: 18062 - protein, 122 aa, Artificial Sequence
  Synthetic polypeptide representing artificial human antibody VH domain
EVQLVESGGGLVQPGGSLRLSCAASGFSLSKYWMTWVRQAPGKGLEWVANIKQNGGEKYYVDSVKGRFTISRDNAKNSLYLQMNSLRAEDTAVYYCARGLIVVLADDVFDIWGQGTMVTVSS

SEQ ID NO: 18063 - protein, 129 aa, Artificial Sequence
  Synthetic polypeptide representing artificial human antibody VH domain
QMQLEQSGPEVKKPGTSVKVACKASGFTFIHSAMQWVRQARGQRPEWIGWIVVGSGNRNIAPKFQDRVIITRDISTDTSYMELRSLKSEDTAVYYCATDPWVGYTGYDYGDYYYGMDVWGQGTTVTVSS

SEQ ID NO: 18064 - protein, 131 aa, Artificial Sequence
  Synthetic polypeptide representing artificial human antibody VH domain
QVQLVQSGAEVKKPGSSVKVSCKASGGTFSTYTISWVRQAPGQGLEWMGRIIPILGIANYAQKFQGRVTITADKSTSTAYMELSSLRSEDTAVYYCARGPEVATVVTRGEDYYYYYGMDVWGQGTTVTVSS

SEQ ID NO: 18065 - protein, 123 aa, Artificial Sequence
  Synthetic polypeptide representing artificial human antibody VH domain
QVQLQESGPGLVKPSETLSLTCTVSGGSISSYYWSWIRQPPGKGLEWIGYIYYSGSTNYNPSLKSRVTISVDTSKNQFSLKLSSVTAADTAVYYCARDPRGWLAAPPGYFDYWGQGTLVTVSS

SEQ ID NO: 18066 - protein, 120 aa, Artificial Sequence
  Synthetic polypeptide representing artificial human antibody VH domain
QVQLVQSGAEMRKPGASVRVSCAASGYTFTDYYIHWVRQAPGQGLEWMGRMNPNSGGSYFAQKFQDRVTMTRDTTISTAYMDLTRLRSDDTAVYFCARDGGSSASSWDYWGQGTLVTVSS

SEQ ID NO: 18067 - protein, 125 aa, Artificial Sequence
  Synthetic polypeptide representing artificial human antibody VH domain
QVQLQQSGPGLMKPSQTLSLTCAISGDSISSDTAAWNWIRQSPSRGLEWLGRTYYRSNWYNNYAVSVKSRITINPDTSKNQFSLQLESVTPEDTALYYCAKTYYAKSGDWYFDLWGRGTLVTVSS

SEQ ID NO: 18068 - protein, 126 aa, Artificial Sequence
  Synthetic polypeptide representing artificial human antibody VH domain
QVQLQESGPGLVKPSQTLSLTCTVSGDSISGGDYYWSWLRQPAGRALEWIGRIYPGGSTNYNSSLKSRVTISVDTSKNQFSLNIDSVTAADTAVYFCARGRWGRPVWRQSYYFDRWGQGTLVTVSS

SEQ ID NO: 18069 - protein, 127 aa, Artificial Sequence
  Synthetic polypeptide representing artificial human antibody VH domain
EVQLLESGGGLVQPGGSLRLSCVASGYVFAKYAMSWVRKVPGKGLEWVAGVTGSGKGTYYAESVEGRFTISRDDSKNTVYLQMNSLGVEDTAVYYCAKDMQFVLFEALISPSYFDHWGPGTQVSVSS

SEQ ID NO: 18070 - protein, 121 aa, Artificial Sequence
  Synthetic polypeptide representing artificial human antibody VH domain
QVRLVQSGAEVKRPGASVKVSCEVSGNSLSDLSIHWVRQGPGKGLEWMGGLDPENGEKIYAQKFQGRVTMTGDLATDTVHMELSSLKSEDSAVYFCVTDLSNNWYRYFDIWGQGTLVSVSS

SEQ ID NO: 18071 - protein, 119 aa, Artificial Sequence
  Synthetic polypeptide representing artificial human antibody VH domain
EVQLVESGGGLVQPGGSLRLSCSTSGFSFSDHYIDWVRQAPGKGLEWVGRTRNRVEGFTTDYAASVKGRFTISRDDSKNSVSLQMNSLKSDDTAVYYCSRSNWWDLDYWGQGTLVTVSS

SEQ ID NO: 18072 - protein, 118 aa, Artificial Sequence
  Synthetic polypeptide representing artificial human antibody VH domain
EVQLVESGGGLVQPGGSLRLSCVASGFSFSNYWMSWVRQSPGKGLEWVANIRQDGAEKYCVDSVRGRFTISRDNAKNSLYLQMDSLRTEDSAVYYCARDSGVVRFDHWGQGALVTVSS

SEQ ID NO: 18073 - protein, 116 aa, Artificial Sequence
  Synthetic polypeptide representing artificial human antibody VH domain
QVQLQESGPGLVKPSETLSLTCSVSGRSISGSYWSWIRQPPGKRPEWIAYVHDSGDNNYNPALRSRVTVAIDTSKNQLSLKLSGVTAADTAVYYCARGSTGQFDPWGQGTLVTVSS

SEQ ID NO: 18074 - protein, 131 aa, Artificial Sequence
  Synthetic polypeptide representing artificial human antibody VH domain
EVQLVESGGGLIQPGESLRLSCVASGFSVTTTQMNWVRQAPGKGLEFVSNIYRGGSIYYGESVEGRVTISTDSSKNTLYLQLRSLRLEDTAVYYCARALDGCDPSSGYRGSACYFYGLDVWGQGTTVIVSS

SEQ ID NO: 18075 - protein, 131 aa, Artificial Sequence
  Synthetic polypeptide representing artificial human antibody VH domain
QVQLVESGGGVVQPGRSLRLSCAASGFTFSSYAMHWVRQAPGKGLEWVAVISYDGSNKYYADSVKGRFTISRDNSKNTLYLQMNSLRAEDTAVYYCARDQAYCGGDCYWGWTYYYYGMDVWGQGTTVTVSS

SEQ ID NO: 18076 - protein, 121 aa, Artificial Sequence
  Synthetic polypeptide representing artificial human antibody VH domain
EVQLLESGGGLVQPGGSLRLSCAASGFTFSNYAMSWVRQAPGKGLEWVSAFSYDGGSTFYADSVKGRFTISRDNSKNTLFLQMNSLRADDTAVYYCAKRQWERDWGAFDVWGQGTMVTVSS

SEQ ID NO: 18077 - protein, 121 aa, Artificial Sequence
  Synthetic polypeptide representing artificial human antibody VH domain
QVQLVESGGGLVKPGGSLRLSCAASGFFVTEYDMSWIRQAPAKGLEWVSSIRSRSDYTDYADSVKGRFTISRDNAKKSVFLHMDSLRDEDTAVYFCAREKGLGATTHFDYWGQGALVTVSS

SEQ ID NO: 18078 - protein, 121 aa, Artificial Sequence
  Synthetic polypeptide representing artificial human antibody VH domain
QVQLQQWGAGLLKPSETLSLTCAVDGDSLNGFDWSWIRQSPGKGLEWIGEVNRDGTTKYKSSLNSRVTISGDASKNQISLKLTSVTAADTAIYFCAREGRTWYGQYYLEHWAQGYPVTVSS

SEQ ID NO: 18079 - protein, 124 aa, Artificial Sequence
  Synthetic polypeptide representing artificial human antibody VH domain
QVQLQESGPGLVKPSQTLSLTCSVSGDSISIDGFYWSWIRQSSGKGLEWLGDIYYTGSTRYNPSLESRLTISVDTSKNDFSLKMTSMTAADTAVYFCARAPPSSTWAGDYFDYWGPGTPVTVSS

SEQ ID NO: 18080 - protein, 117 aa, Artificial Sequence
  Synthetic polypeptide representing artificial human antibody VH domain
EVQLVESGGDLVQPGGSLRLSCAASGFTFSSYWMGWVRQAPGKGLEWVANIKKDGSTYYYVDSVKGRFTISRDNAKNLLYLQMNNLRAEDTAVYYCARHGDYAFDDWGQGSLVTVSS

SEQ ID NO: 18081 - protein, 115 aa, Artificial Sequence
  Synthetic polypeptide representing artificial human antibody VH domain
EVQLLESGGGLVQPGGSLRLSCAASGFTFSPYWMRWVRQAPGKGLECVASINEDGSHKYYVDSVKGRFTISRDNTKNSLYLQMNSLRVDDTSVYYCASEYTSGLWGQGTLVTVSS

SEQ ID NO: 18082 - protein, 127 aa, Artificial Sequence
  Synthetic polypeptide representing artificial human antibody VH domain
QVRLVESGGGVVHPGKSLRLSCAASRLSVSRYAMHWVRQAPGKGLEWVAVISYDGTIKHYADSVQGRFSVSRDNSENTVHLQLTSLRPEDTALYYCAKGGYSSSWQTDFYYYGMDVWGQGTMVTVSS

SEQ ID NO: 18083 - protein, 119 aa, Artificial Sequence
  Synthetic polypeptide representing artificial human antibody VH domain
EVQLVESGGGLVQPGGSLRLSCAASGFIFSDHYMEWVRQAPGKGLEWVGRSGNKGLNYRSDYAASVRGRSTISRDDSKNSVYLQMNSLRTEDTAVYYCTRENSGGNRDWGQGTLVTVSS

SEQ ID NO: 18084 - protein, 123 aa, Artificial Sequence
  Synthetic polypeptide representing artificial human antibody VH domain
QVQLQESGPGLVKPSQTLSLTCTVSGASLSSGSYYWSWIRQPAGKGLEWIGRVYTSGTTNYNPSLKSRVTMSLDRSNNQFSLNLNSVTAGDTAVYYCVRDRRYLERDWSFDLWGRGALVTVSS

SEQ ID NO: 18085 - protein, 122 aa, Artificial Sequence
  Synthetic polypeptide representing artificial human antibody VH domain
QVQLVQSGSELKKPGASVKVSCKASGYTFTRYAMNWVRQAPGQGLEWMGWINTNTGNPTYAQGFTGRFVFSLDTSVSTAYLQISSLKAEDTAVYYCARASRVSPWFREFDYWGQGTLVTVSS

SEQ ID NO: 18086 - protein, 117 aa, Artificial Sequence
  Synthetic polypeptide representing artificial human antibody VH domain
EVQLVESGGDLVQPGGSLRLSCAASGFMFSSSWMGWVRQAPEKGLEWVANIKKDGSTYYYMDSVKGRFTISRDNAKNLLYLQMNNLRAEDTAVYYCARHGDYAFDAWGQGSLVTVSS

SEQ ID NO: 18087 - protein, 114 aa, Artificial Sequence
  Synthetic polypeptide representing artificial human antibody VH domain
QVQLVQSGAEVKKPGSSVKVSCRASGDTFTKYAFSWVRQAPGHGLEWMGRIIPILNTPIYVAKFQGRVTITADESTSTAYMELSSLRSEDTAVYFCATDGGTYWGQGTLVTVSS

SEQ ID NO: 18088 - protein, 132 aa, Artificial Sequence
  Synthetic polypeptide representing artificial human antibody VH domain
EVQLVQSGAEVKKPGESLKISCKGSGYSFTSYWIGWVRQMPGKGLEWMGIIYPGDSDTRYSPSFQGQVTISADKSISTAYLQWSSLKASDTAMYYCARQNSLATGDSSSWNHYYYYYYMDVWGKGTTVTVSS

SEQ ID NO: 18089 - protein, 120 aa, Artificial Sequence
  Synthetic polypeptide representing artificial human antibody VH domain
QVQLVESGGGVVQPGGSLRLSCTVSGFTFTNHGMHWVRQAPGKGLEWVAVMWSEGSKKYYADSVKGRFAISRDNSRNSLFLEMSSLRDDDTAVYYCARESPDGWLYFDHWGRGSLVTVSS

SEQ ID NO: 18090 - protein, 120 aa, Artificial Sequence
  Synthetic polypeptide representing artificial human antibody VH domain
EVQMLESGGGLVQPGGSLRLSCVVSGFSFSSYAMSWVRQAPGKGLEWVSTVSKTSVGTYYADSVRGRFTISRDNSKSTFYLQMNSLRAEDTALYYCTNGGGPFLVSGSYWGQGIQITVSS

SEQ ID NO: 18091 - protein, 130 aa, Artificial Sequence
  Synthetic polypeptide representing artificial human antibody VH domain
QVQIEESGPRLVKPSGTLSLTCAVSPGSINLSLRWSWVRQSPERGLEWIGDISYGGSGNYNPSLKSRATVSIAASDNRVSLQLTSVTAADTAIYYCAQIYIMKDLDWSRKVFWHYHMEVWGEGTTVTVSS

SEQ ID NO: 18092 - protein, 124 aa, Artificial Sequence
  Synthetic polypeptide representing artificial human antibody VH domain
EVQLVESGGRLVQPGGSLRLSCIGSGFTFSSYSMNWVRQAPAKGLEWVAHINGISGAIEYAGSVKGRFTISTDNAKNSVFLQMNSLRVEDTAVYYCARDAKAAYSGYNYFFDYWGQGTVVTVSS

SEQ ID NO: 18093 - protein, 125 aa, Artificial Sequence
  Synthetic polypeptide representing artificial human antibody VH domain
QVQLVESGGGVVQPGRSLRLSCAASGFTFSSYGMHWVRQAPGKGLEWVAVIWYDGSNKYYADSVKGRFTISRDNSKNTLYLQMNSLRAEDTAVYYCARDHCSGGSCYLDWYFDLWGRGTLVTVSS

SEQ ID NO: 18094 - protein, 128 aa, Artificial Sequence
  Synthetic polypeptide representing artificial human antibody VH domain
QVQLQESGPGLVKPSQTLSLTCTVSGGSISSGDYYWSWIRQPPGKGLEWIGYIYYSGSTYYNPSLKSRVTISVDTSKNQFSLKLSSVTAADTAVYYCARAGTRRRIFGVVIVEAFDIWGQGTMVTVSS

SEQ ID NO: 18095 - protein, 128 aa, Artificial Sequence
  Synthetic polypeptide representing artificial human antibody VH domain
QVQLVQSGAEVKKPGASVKVSCKASGYTFTSYYMHWVRQAPGQGLEWMGIINPSGGSTSYAQKFQGRVTMTRDTSTSTVYMELSSLRSEDTAVYYCAREKSTTVTTGLPSEYYYMDVWGKGTTVTVSS

SEQ ID NO: 18096 - protein, 119 aa, Artificial Sequence
  Synthetic polypeptide representing artificial human antibody VH domain
EVHLVGSGGRLIQPGGSLRLSCVASGFLVTSNFMTWVRQAPGKGLEWISIIYINGDTSYADSVKGRFTISRDTSKNTVYLQMNNLRAEDTAVYYCVKSGYSGYGRLESWGQETRVTVSS

SEQ ID NO: 18097 - protein, 128 aa, Artificial Sequence
  Synthetic polypeptide representing artificial human antibody VH domain
EVQLVESGGGLVQPGGSLRLSCAASGFTFSSYEMNWVRQAPGKGLEWVSYISSSGSTIYYADSVKGRFTISRDNAKNSLYLQMNSLRAEDTAVYYCARDHSNLITIFGVVISHYFDYWGQGTLVTVSS

SEQ ID NO: 18098 - protein, 128 aa, Artificial Sequence
  Synthetic polypeptide representing artificial human antibody VH domain
QVQLQESGPGLVKPSQTLSLTCTVSGGSISSGDYYWSWIRQPPGKGLEWIGYIYYSGSTYYNPSLKSRVTISVDTSKNQFSLKLSSVTAADTAVYYCAREAFSITIFGVVTRWGFDPWGQGTLVTVSS

SEQ ID NO: 18099 - protein, 121 aa, Artificial Sequence
  Synthetic polypeptide representing artificial human antibody VH domain
EVQRVESGGGLVQPGRSLRLSCAASGFTFSDHYMDWVRQAPGKGLEWVARSRNKAKRYSTHYAASVKGRFTISRDDSNNSLYLQMNSLKSEDTAVYFCVSPSTSGSEFDSWGQGTLVTVSS

SEQ ID NO: 18100 - protein, 121 aa, Artificial Sequence
  Synthetic polypeptide representing artificial human antibody VH domain
EVQLMQSGAEMKKPGESLKISCRGSGFRFFNYWIGWVRQRPGQGLEWMGIIYPGDSDTKYSPSFQGQVTMSADKSISTAYLQWTSLKVSDTATYYCARLGGSDVGNWFDFWGQGTPVIVSS

SEQ ID NO: 18101 - protein, 119 aa, Artificial Sequence
  Synthetic polypeptide representing artificial human antibody VH domain
QVQLVESGGGLVKPGGSLRLSCAASGFTFSDYYMSWIRQAPGKGLEWVSYISSSSSYTNYADSVKGRFTISRDNAKNSLYLQMNSLRAEDTAVYYCARDCSGGSCLGYWGQGTLVTVSS

SEQ ID NO: 18102 - protein, 126 aa, Artificial Sequence
  Synthetic polypeptide representing artificial human antibody VH domain
QVTLRESGPALVKPTQTLTLTCTFSGFSLSTSGMCVSWIRQPPGKALEWLALIDWDDDKYYSTSLKTRLTISKDTSKNQVVLTMTNMDPVDTATYYCARMWIQLWPRNYYYGMDVWGQGTTVTVSS

SEQ ID NO: 18103 - protein, 121 aa, Artificial Sequence
  Synthetic polypeptide representing artificial human antibody VH domain
QVQLVESGGDVVRPGRSLRLSCETSGFVFSNFAMHWVRQAPGEGLQWVAIISYDGTTLYSGDSVKGRFTISRDNSKNTLFLQMDSLRPEDTAVYYCAKETEDHTSSYFDSWGQGTLVTVSS

SEQ ID NO: 18104 - protein, 123 aa, Artificial Sequence
  Synthetic polypeptide representing artificial human antibody VH domain
QVQLVESGGGVVQPGRSLRLSCAASGFTFSSYAMHWVRQAPGKGLEWVAVISYDGSNKYYADSVKGRFTISRDNSKNTLYLQMNSLRAEDTAVYYCARDPDSGYDLDDAFDIWGQGTMVTVSS

SEQ ID NO: 18105 - protein, 120 aa, Artificial Sequence
  Synthetic polypeptide representing artificial human antibody VH domain
QLQLQESGPGLVKPSETLSLTCTVSGGSISNGNYYWGWIRQPPGKGLEWIGSFFYGGSTFYNPSLKSRVAISVDTSKNLFSLILSSVTASDTAVYYCARHASSAAGIDFWGQGTLVTVSS

SEQ ID NO: 18106 - protein, 121 aa, Artificial Sequence
  Synthetic polypeptide representing artificial human antibody VH domain
EVQLVESGGGLVQPGGSLRLSCAASGFIFDYYEMNWFRQAPGEGLEWVSYINRTGSTLYYADSVKGRFTISRDNTKNSLYLQMNSLRVDDTAVYFCARDRCDDVDCYSDYWGQGTLVTVSS

SEQ ID NO: 18107 - protein, 120 aa, Artificial Sequence
  Synthetic polypeptide representing artificial human antibody VH domain
QVQLVQSGAEVKKPGASVKLSCKVSGYSLTEVGMHWVRQAPGRGLEWMGGFVPEDGATVFAQKFQGRVSVTEDASSGTAYMELSSLRSEDTAVYYCATAFQYQELPISSWGPGTLVTVSS

SEQ ID NO: 18108 - protein, 122 aa, Artificial Sequence
  Synthetic polypeptide representing artificial human antibody VH domain
QVQLQESGPGLVKPSQTLSLTCTVSGGSISSGSYYWSWIRQPAGKGLEWIGRIYTSGSTNYNPSLKSRVTISVDTSKNQFSLKLSSVTAADTAVYYCARGPAASYYYGMDVWGQGTTVTVSS

SEQ ID NO: 18109 - protein, 130 aa, Artificial Sequence
  Synthetic polypeptide representing artificial human antibody VH domain
QVQLVQSGAEVKKPGSSVKVSCKASGGTFSNYAFNWVRQAPGQGLEWVGGIIPVFVIPDYAQKFQGRVTISADKSTTTVTMELTTLRSDDTAVYYCARRRTGSSHGFIPSLAIGDGFDIWGQGTRVTVSS

SEQ ID NO: 18110 - protein, 122 aa, Artificial Sequence
  Synthetic polypeptide representing artificial human antibody VH domain
QVQLVQSGAEVKKPGASVKVSCKVSGYILSALPIHWVRQAPGEGLEWMGNFDPQNGETISAQKFQGRITMTEDTSTDTAYMELSSLRSEDTAVYYCATEGVVPVVIYAFDVWGQGIMVTVSS

SEQ ID NO: 18111 - protein, 129 aa, Artificial Sequence
  Synthetic polypeptide representing artificial human antibody VH domain
EVQLVESGGGLVQPGRSLRLSCAASGFTFDDYAMHWVRQAPGKGLEWVSGISWNSGSIGYADSVKGRFTISRDNAKNSLYLQMNSLRAEDTALYYCAKAHYYYDSSGYYRGYYYGMDVWGQGTTVTVSS

SEQ ID NO: 18112 - protein, 126 aa, Artificial Sequence
  Synthetic polypeptide representing artificial human antibody VH domain
QVQLQESGPGLLKPSQTLSLTCTVSGGSISSGEYYWSWIRQPPGKGLEWIGYIYYRGSTYYNPSLKSRTTVSIDTPKNQFSLTLSSVTAADTAVYYCARDRRGYCSAGPCYRIDSWGQGILVTVSS

SEQ ID NO: 18113 - protein, 120 aa, Artificial Sequence
  Synthetic polypeptide representing artificial human antibody VH domain
QVQLVESGGGVVQPGRSLRLSCAASGFTFSSYGMHWVRQAPGKGLEWVAVISYDGSNKYYADSVKGRFTISRDNSKNTLYLQMNSLRAEDTAVYYCARGYSSGWWYFDLWGRGTLVTVSS

SEQ ID NO: 18114 - protein, 122 aa, Artificial Sequence
  Synthetic polypeptide representing artificial human antibody VH domain
EVQLEQSGAEVRKPGESLKISCKGSGYRFSTHWIGWVRQMPGKGLEWMGIIYPGDYDTRYSPSFQGQVHISVDKSVDTAYLQWNSLQASDTAMYFCARATTGTSNPYNFDYWGQGTLVTVSS

SEQ ID NO: 18115 - protein, 124 aa, Artificial Sequence
  Synthetic polypeptide representing artificial human antibody VH domain
QVQLLQSGTEVKKPGASVKVFCKAFGYTFSSYFIHWVRQAPGEGLEWMAMINPGGGRPEYSQEFQARVTVTRDTSTNTVHMEMRSLRSEDTAVYYCARGDYVWGSDRYDDMDVWGQGTTVIVSS

SEQ ID NO: 18116 - protein, 124 aa, Artificial Sequence
  Synthetic polypeptide representing artificial human antibody VH domain
QVQLVQSGAEVKKPGASVKVSCKASGYTFTSYYMHWVRQAPGQGLEWMGIINPSGGSTSYAQKFQGRVTMTRDTSTSTVYMELSSLRSEDTAVYYCARDPNVDSYGYVSWFDPWGQGTLVTVSS

SEQ ID NO: 18117 - protein, 116 aa, Artificial Sequence
  Synthetic polypeptide representing artificial human antibody VH domain
QVQLVQSGAEVKKPGASVKVSCKASGYTFTSYGISWVRQAPGQGLEWMGWISAYNGNTNYAQKLQGRVTMTTDTSTSTAYMELRSLRSDDTAVYYCARGGDGYNPWGQGTLVTVSS

SEQ ID NO: 18118 - protein, 122 aa, Artificial Sequence
  Synthetic polypeptide representing artificial human antibody VH domain
EVQLVESGGGLVQPGGSLRLSCAASGFTFSSYWMSWVRQAPGKGLEWVANIKQDGSEKYYVDSVKGRFTISRDNAKNSLYLQMNSLRAEDTAVYYCARVCDGGSSWDAFDIWGQGTMVTVSS

SEQ ID NO: 18119 - protein, 128 aa, Artificial Sequence
  Synthetic polypeptide representing artificial human antibody VH domain
EVHLVESGGGLVKPGETLRLSCAASGFTFSMAWMNWVRQAPGKGLEWIGRVKSRVDGGTTDYAAPLSGRFAISRDDSQSTVSLQINNLEAEDTAVYFCTTLLTDYFDASGARHYFDYWGRGALVTVSS

SEQ ID NO: 18120 - protein, 129 aa, Artificial Sequence
  Synthetic polypeptide representing artificial human antibody VH domain
QVQLVESGGGVVQPGRSLRLSCAASGFTFSSYGMHWVRQAPGKGLEWVAVIWYDGSNKYYADSVKGRFTISRDNSKNTLYLQMNSLRAEDTAVYYCARGGYIAVAGTGLYYYYYGMDVWGQGTTVTVSS

SEQ ID NO: 18121 - protein, 123 aa, Artificial Sequence
  Synthetic polypeptide representing artificial human antibody VH domain
QLQLQESGPGLVQPSETLTLTCTVSGVSISSSRDFWGWIRQPPGMGPEWIGSIFYSGSTHYNPSLKSRVTISVDTSKNQFSLKLTSVTAADTAAYYCARHFLRGKNPDYFDYWGQGPLVTVSS

SEQ ID NO: 18122 - protein, 122 aa, Artificial Sequence
  Synthetic polypeptide representing artificial human antibody VH domain
QVTLRESGPALVKPTQTLTLTCTFSGFSLSTSGMCVSWIRQPPGKALEWLARIDWDDDKFYSTSLKTRLTISKDTSKNQVVLTMANMGPVDTATYYCARTSRVQTSYDFDYWGQGSLVTVSS

SEQ ID NO: 18123 - protein, 132 aa, Artificial Sequence
  Synthetic polypeptide representing artificial human antibody VH domain
QVQLVQSGAEVKKPGASVKVSCKASGYTFTSYGISWVRQAPGQGLEWMGWISAYNGNTNYAQKLQGRVTMTTDTSTSTAYMELRSLRSDDTAVYYCARLGHLSSWYENLGGPSYYYYGMDVWGQGTTVTVSS

SEQ ID NO: 18124 - protein, 128 aa, Artificial Sequence
  Synthetic polypeptide representing artificial human antibody VH domain
QVQLVESGGGVVQPGKSLRLSCAASGFTFSSYGMHWVRQAPGKGLEWVAAIWYDGSDKYYADSVKGRFTISRDNSKNTLYLQMNSLRAEDTSVYYCAREGPTQGFYGSGSYNNGLDYWGQGTLVTVSS

SEQ ID NO: 18125 - protein, 121 aa, Artificial Sequence
  Synthetic polypeptide representing artificial human antibody VH domain
QVQLVQSGAEVKKPGSSVKVSCKASGGTFSSHAISWVRQAPGQGLEWMGRIIPMLDIANYAQKFQGRVTITADKSTTTANMELSSLQSEDTAVYYCAGGDYYGSGSWHDYWGQGTLVTVSS

SEQ ID NO: 18126 - protein, 118 aa, Artificial Sequence
  Synthetic polypeptide representing artificial human antibody VH domain
QITLKESGPTLVRPTQTLTLTCTFSGFSLSTSGVSVGWIRQPPGKALEWLALIYWDDDERYRPSLRSRLTISKDTSKNQVVLTMTDMDPVDTATYYCARSLTRYFDYWGQGTLVTVSS

SEQ ID NO: 18127 - protein, 121 aa, Artificial Sequence
  Synthetic polypeptide representing artificial human antibody VH domain
QVQLVQSGAEVKKPGASVNISCKASGFTFNLYYVQWVRQAPGQGLEWMGLISLSGGKTSYSQNFQGRVSMTRDTSTSTVYMELSSLTSEDTAVYYCARGGVTWIELWSDFWGQGTLVTVSA

SEQ ID NO: 18128 - protein, 126 aa, Artificial Sequence
  Synthetic polypeptide representing artificial human antibody VH domain
QLQLQESGPGLVKPSETLSLTCTVSGDSVSSSTYYWGWIRQSPGKGLEWIGSVYYSRNTYYNPSLKSRVTISIDTSKNQFSLKLFSVTAADTAMYYCARHGASSYYEGPQMYFDNWGQGTLVTVSS

SEQ ID NO: 18129 - protein, 120 aa, Artificial Sequence
  Synthetic polypeptide representing artificial human antibody VH domain
EVQLVESGGGLVQPGGSLRLSCAASGFTVGSSFMNWVRQAPGKGLEWVSVIYPGESTYYADSVEGRFTISRDNSENTLSLHMNSLGAEDTAVYFCARALQWGLPLTWVSWGQGTLVTVTS

SEQ ID NO: 18130 - protein, 116 aa, Artificial Sequence
  Synthetic polypeptide representing artificial human antibody VH domain
EVQLVQSGAEVKKPGESLKISCKTSGYSFVSDRIDWIRQVPGKGLEFMGAIDPRDSETRYSAPFQGHVTFSADKSISAAYLQWSSLKASDTAIYYCTRAASGWPNWGQGTLVTVSS

SEQ ID NO: 18131 - protein, 116 aa, Artificial Sequence
  Synthetic polypeptide representing artificial human antibody VH domain
EVQLVESGGGLVQAGGSLRLSCSTSGFTFSSYAMHWVRQAPGKGLEYVSAISSGGTTYYADSVKGRFTISRDNSKNTLYLQMSSLRVEDTAMYQCVKLGRQSNDYWGQGTLVTVSS

SEQ ID NO: 18132 - protein, 121 aa, Artificial Sequence
  Synthetic polypeptide representing artificial human antibody VH domain
QLQLQESGPGLVRPSETLSLTCTVSGDSIGTTSYYWGWMRQPPGKGLEWIGTFYYTRENFYNPSLKSRVTISADTSKNQFSLELTSVTASDTAVYFCAGPFMRLEHIWGHWGQGALVTVSS

SEQ ID NO: 18133 - protein, 121 aa, Artificial Sequence
  Synthetic polypeptide representing artificial human antibody VH domain
EVQLVESGGGLVQPGGSLRLSCAASGLTFKNYWMHWVRQAPGKGLLWVSRISSDGRDTNYADSVKGRFTTSRDNAKNTLYLQMNGLTAEDTAVYFCASDRYWYDSSGYDYWGQGTLVTVSS

SEQ ID NO: 18134 - protein, 125 aa, Artificial Sequence
  Synthetic polypeptide representing artificial human antibody VH domain
QVQLQQSGPGLLKSSQTLSLTCAISGDRVSSNTGAWTWIRQSSSRGLEWLGTTYYRSRWNFDYADSEDGRIAITPDTSENQVSLHLNSVTPEDTAVYYCARGRWLQSNYFAMDVWGQGTTVIVSS

SEQ ID NO: 18135 - protein, 131 aa, Artificial Sequence
  Synthetic polypeptide representing artificial human antibody VH domain
QVQLVQSGVEVKQPGASVKVSCKASGYTFTTYGISWVRQAGGHGLEWMGWISGHNGKTEYAQKFQGRVTMTTDTSTSTAYMELRSLRSDDTAIYYCARDNPELQYFDWLRSGYSHTGVDVWGQGTAVTVSS

SEQ ID NO: 18136 - protein, 131 aa, Artificial Sequence
  Synthetic polypeptide representing artificial human antibody VH domain
QVQLVQSGVEVKQPGASVKVSCKASGYTFTTYGISWVRQAGGQGLEWMGWISGHNGKTEYAQKFQGRVTMTTDTSTSTAYMELRSLRSDDTAIYYCARDNPELQYFDWLRSDYSHTGVDVWGQGTAVTVSS

SEQ ID NO: 18137 - protein, 120 aa, Artificial Sequence
  Synthetic polypeptide representing artificial human antibody VH domain
EVQMLESGGGLVQPGGSLRLSCVAPEFTFRVYDMNWIRQAPGKGLEWVSTIHGWEDSTFYADSVKGRFTISRDRSKNTLFLQMNSLRADDTAVYYCAKGLTPQMNFFDSWGQGAPVTVSS

SEQ ID NO: 18138 - protein, 119 aa, Artificial Sequence
  Synthetic polypeptide representing artificial human antibody VH domain
QITLHESGPTLVKPTQTLTLTCNFSGFSLSTSGVALGWIRQPPGKALEWLALIFWDDDKRYSPSLKSRLTVTKLTSENQVVLTMTNMDPVDTATYFCAHRPGLRPFDYWGQGTLVTVSS

SEQ ID NO: 18139 - protein, 115 aa, Artificial Sequence
  Synthetic polypeptide representing artificial human antibody VH domain
EVHLLESGGGLVQPGGSLRLSCAASGFTFNTFDMTWVRQASGKGLEWVSTIIGHDGTTFYADAVKGRFTISRDNSKNTLYLQMSSLRAEDTAIYFCVKGAWCDFWGQGALVTVSS

SEQ ID NO: 18140 - protein, 115 aa, Artificial Sequence
  Synthetic polypeptide representing artificial human antibody VH domain
EVHLLESGGGLVQPGGSLRLSCAASGFTFNTFDMTWVRQASGKGLEWVSTIIGHDGTTFYADAVKGRFTISRDNSKNTLYLQMSSLRAEDTAIYFCVKGAWCDYWGQGALVTVSS

SEQ ID NO: 18141 - protein, 122 aa, Artificial Sequence
  Synthetic polypeptide representing artificial human antibody VH domain
QLQLQESGPGLVRSSETLSVTCNVSGDSISSTSNYWGWIRLSPGKGLEWIGSIYYSATTYYNPSLKTRVTISIDTSKKQISLKLSSVTAADTAVYYCARGLTAGATSGFDPWGQGTLVSVSS

SEQ ID NO: 18142 - protein, 119 aa, Artificial Sequence
  Synthetic polypeptide representing artificial human antibody VH domain
QLQLQQWGAGLLKPSETLSLTCTVSGDSITSSSYYWGWIRQPPGKGLEWIVSIYYSGTTYNNPSLKSRVTISVDTSKNQFSLKLSSVTAADTAVYFCASRAVARNLEYWGQGTLVTVSS

SEQ ID NO: 18143 - protein, 121 aa, Artificial Sequence
  Synthetic polypeptide representing artificial human antibody VH domain
QVQLVESGGGVVQPGGSLRLSCAASGFTFATHAMHWVRRAPAKGLEWVAIISYAGTTKYNSDSVKGRFTISRDNSKNILHLQMDGLRTEDTAIYFCAKETSDHTSSYFDSWGQGTLVTVSS

SEQ ID NO: 18144 - protein, 122 aa, Artificial Sequence
  Synthetic polypeptide representing artificial human antibody VH domain
EVQLVESGGGWVQPGGSLRLACAASGFSVSSNYMTWVRQAPGKGLDWVSLIYTGGDTEYVDSVRGRFSISRDDSKNTLYLHMNSLRAEDTAVYYCARGGDHVLHDGWFFDLWGRGTLVTVSS

SEQ ID NO: 18145 - protein, 128 aa, Artificial Sequence
  Synthetic polypeptide representing artificial human antibody VH domain
QLQLQESGPGLVQPSETLSLTCTVSGDSISSSSYHWGWIRQPPGKGLEWIGSVYYSGSTYYNPSLKSRVTISVDTSKNQFSLKLSSVTAADTAVYYCARHLRGFCSSGSCYLYYFDQWGQGTLVTVSS

SEQ ID NO: 18146 - protein, 124 aa, Artificial Sequence
  Synthetic polypeptide representing artificial human antibody VH domain
EVQLVQSGAEVKKPGATVKISCKVSGYTFTDYYMHWVQQAPGKGLEWMGLVDPEDGETIYAEKFQGRVTITADTSTDTAYMELSSLRSEDTAVYYCATVKGTVTTLGYYGMDVWGQGTTVTVSS

SEQ ID NO: 18147 - protein, 130 aa, Artificial Sequence
  Synthetic polypeptide representing artificial human antibody VH domain
QLQLQESGPGLVKPSETLSLTCTVSGGSISSSSYYWGWIRQPPGKGLEWIGSIYYSGSTYYNPSLKSRVTISVDTSKNQFSLKLSSVTAADTAVYYCARHGMGEWELLSRFRSRGYFDYWGQGTLVTVSS

SEQ ID NO: 18148 - protein, 123 aa, Artificial Sequence
  Synthetic polypeptide representing artificial human antibody VH domain
EVQLLESGGGLVQPGGSLRLSCAASGFTFSSYAMTWVRQAPGKGLEWVSTISGSGVSTYYADSVKGRFTISRDNSKNTLYLQMNSLRAEDTAFYYCARDLLLWFGETPGKDYGGQGTLVTVSS

SEQ ID NO: 18149 - protein, 119 aa, Artificial Sequence
  Synthetic polypeptide representing artificial human antibody VH domain
QVHLQQWGAGLLRPSETLSLTCAVFGGSFSGYHWTWIRQVPGKGLEWIGEIHHDGGINYNPSLKSRVTISVDTSKNQFSLNLNSVTAADTALYFCSRGQHEEWPVGDYWGQGTLVTVSS

SEQ ID NO: 18150 - protein, 121 aa, Artificial Sequence
  Synthetic polypeptide representing artificial human antibody VH domain
EVQLVESGGGLVQPGGSLRLSCAVSGFSISNYYMSWVRQAPGKGLEWVANIHQNGNEKKYVRSVKGRFTISKAENTVYLQMNSLTTEDTAVYYCARFTGWTSTIKDCLDLWGRGTMVTVSP

SEQ ID NO: 18151 - protein, 130 aa, Artificial Sequence
  Synthetic polypeptide representing artificial human antibody VH domain
EVHLLESGGGLVQPGGSLKLSCAASGFNFGTYAMTWIRQAPGKGLEWVSVIGGGGAGTDYADSMKGRITISRDNSKNMLYLHMDSLRAEDTALYYCARGGGGFCTTTTCYELRFNYYDYWGQGTQVTVSS

SEQ ID NO: 18152 - protein, 128 aa, Artificial Sequence
  Synthetic polypeptide representing artificial human antibody VH domain
EVQLVNSGGGLVRSGESLRLSCSASGITFSSYEMNWVRQAPGKGLEWVSYISASGTTTHYADCVKGRFTISRDNAENSMYLQMNSLRDEDTAVYYCVTDREVPGTVMITPANSAFDIWGQGTRVTVSS

SEQ ID NO: 18153 - protein, 117 aa, Artificial Sequence
  Synthetic polypeptide representing artificial human antibody VH domain
QVQLVQSGAEVKKPGASVKVSCKASGFSFTNYDMLWARQATGQGLEWMGWINPTSGSTDAAQRFQGRVTMTGDTSTSTVYMELSGLRSEDTGVYYCARGPHGYFDFWGQGTLVTVSS

SEQ ID NO: 18154 - protein, 124 aa, Artificial Sequence
  Synthetic polypeptide representing artificial human antibody VH domain
EVQLLESGGDLVQPGGSLRLSCAASGFTFSNYAMTWVRQAPGKGLEWVSTISASGDNTYYAGSVKGQFAISRDNSKNTLYLQMNSLRVEDTARYYCAKDLGYGGNYGTGAFDIWGQGTVVIVSS

SEQ ID NO: 18155 - protein, 132 aa, Artificial Sequence
  Synthetic polypeptide representing artificial human antibody VH domain
QVQLQESGPGLVKPSETLSLTCTISGVSMSGFYWTWMRQTPGKRLEWIGNIYNGGVTKYNPSLKSRVTISRDTSKNQFSLKMKSVTAADTAVYYCARDHGRERIPMVRGEPDIDFYYGMDVWGHGTSVTVSS

SEQ ID NO: 18156 - protein, 125 aa, Artificial Sequence
  Synthetic polypeptide representing artificial human antibody VH domain
EVQLVESGGGLAQPGGSLRLSCAASGMIFSSYEMNWVRQAPGKGLEWVSYISGSGSRVHYADSVKGRFTMSRENGKNTVHLQMSGLRAEDTAVYYCARGGIAVTGTRYYYSMDVWGQGTAVTVSS

SEQ ID NO: 18157 - protein, 124 aa, Artificial Sequence
  Synthetic polypeptide representing artificial human antibody VH domain
QVQLRESGPGLVKPSESLSLTCTVSDIPIRYFFWSWIRQSPGKGLEWVASVSDSGRSKYNPSLESRASISGDTSKNRLSLKLDSITDADTAVYYCARGNYFEAASPMAGYFDPWGQGIQVTVSS

SEQ ID NO: 18158 - protein, 121 aa, Artificial Sequence
  Synthetic polypeptide representing artificial human antibody VH domain
QVQLQESGPGLLRPSETLSLACSVSGGSISGHYWSWIRQPPGKGLEWIGYIHSSGVTNYDPSLKSRVTFSVDTSKNHFSLALRSVTAADTAIFYCARYHCPADICDGFDLWGQGTTVTVSS

SEQ ID NO: 18159 - protein, 135 aa, Artificial Sequence
  Synthetic polypeptide representing artificial human antibody VH domain
EVQLGESGGGLTTPGGSLRLSCKGSGFNFGDYAFNWFRQAPGRGLEWVGFIRSLAYGGTTDTAASLRGRFTLSRDDSENITYLQMERLKSDDTAVYYCTRDQTYLKGRHHAVKCSGGTCGVPGHWGHGTLVTVSS

SEQ ID NO: 18160 - protein, 126 aa, Artificial Sequence
  Synthetic polypeptide representing artificial human antibody VH domain
QVQLVESGGGVVQPGRSLRLSCAASGFTFSSYGMHWVRQAPGKGLEWVALISYDGSNKYYADSVKGRFTISRDNSKNTLYLQMNSLRAEDTAVYYCAKDQYVGNPRASYYYGMDVWGQGTTVTVSS

SEQ ID NO: 18161 - protein, 118 aa, Artificial Sequence
  Synthetic polypeptide representing artificial human antibody VH domain
EVQLVESGGGLVQPGGSLRLSCAASGFNFSSHEMNWVRQAPGKGLEWLSYISRTGRTIFYADAVKGRFTTSRDNGRNSLSLQMDSLRAEDTAVYYCARGGSGDGMNVWGQGTTVTVSS

SEQ ID NO: 18162 - protein, 120 aa, Artificial Sequence
  Synthetic polypeptide representing artificial human antibody VH domain
EVQLVESGGGLVQPGGSLRLSCEVSGFILGNYWMDWVRQVPGKGLVWVSIINKDGSTTKYADSVKGRFTISRDNAKNMLYLQLNSLRDEDTAIYYCARDVPETGYGMDVWGHGTMVTVSS

SEQ ID NO: 18163 - protein, 123 aa, Artificial Sequence
  Synthetic polypeptide representing artificial human antibody VH domain
QVQLQQWGAGLLRPSETLSLTCGVYGRSFSGYHYSWIRQTAERGLEWIGEITERGRTTYNPSLKSRVTISGDTSKKQYFLRLSSVTAADTAVYYCARGPSAVGKDYYFYMDLWGRGTTVTVSS

SEQ ID NO: 18164 - protein, 121 aa, Artificial Sequence
  Synthetic polypeptide representing artificial human antibody VH domain
EVTLVESGGDLVQPGRSLRLSCAVSGFFFSSFEMIWVRQAPGKGLEWLAYIDSAGTTQYYADSARGRFTISRDNANDSLSLEMNSLSVADTGVYYCARVGGILVWGSFDFWGPGTPVTVSS

SEQ ID NO: 18165 - protein, 122 aa, Artificial Sequence
  Synthetic polypeptide representing artificial human antibody VH domain
EVQLLESGGGLAQPGGSLRLSCAASGFPFSSYVMNWVRQAPGKGLEWVSGIRGSGGGTNYADSVRGRFTISRDNSEKTLYLQMTSLRVEDTAIYYCAKYWSGGSRPDAFGIWGQGTMVIVSS

SEQ ID NO: 18166 - protein, 123 aa, Artificial Sequence
  Synthetic polypeptide representing artificial human antibody VH domain
QVQLVQSGAEVKKPGASVKVSCKASGYTFTKNYIHWVRQAPGQGLEWMGRINPTGGGASYAQRFQGRLTMTRDTSTSTVYMELSSLRSEDTAVYYCARDVVEVTAAWFYFDYWGQGTLVTVSS

SEQ ID NO: 18167 - protein, 117 aa, Artificial Sequence
  Synthetic polypeptide representing artificial human antibody VH domain
QVHLVESGGGVVQPGRSLRLSCAASEFAFSIYAMHWVRQAPGKGLEWVAVISKDGRNEYYGDSVKGRFTISRDTNKSMHYLQMNNLRAEDTAVYYCATDSQGYFDNWGPGTLVTVSS

SEQ ID NO: 18168 - protein, 122 aa, Artificial Sequence
  Synthetic polypeptide representing artificial human antibody VH domain
QLQLQESGPGQVKPSETLSLTCSVSGGSISGSFFYWGWIRQPPGKGLEWLGSISDSENTYYNPSLKDRLSISVDSSKNRVSLTLTSVTAADTAVYYCGRPQSVAHRDRFGIWGRGTRVTVSS

SEQ ID NO: 18169 - protein, 122 aa, Artificial Sequence
  Synthetic polypeptide representing artificial human antibody VH domain
EVQLVQSGADLKEPGESLRISCEASGYPFVKRFTNFWISWVRQLPGKGLEWMGRIDPSDSYTQYNPSFQGHIIISADKSISTAYLLLTSLKAADTAIYFCARHDGSYHFDYWGQGTLVTVSS

SEQ ID NO: 18170 - protein, 129 aa, Artificial Sequence
  Synthetic polypeptide representing artificial human antibody VH domain
EVRLVESGGGLVQPGGSLRLSCATSGFIFRTYEMNWVRQAPGKGLEWISWISWMNGDASNTLYADSVKGRFTIARDNAKNSLYLQMKRLTVEDTAIYYCTRETYPPVGGTHHFYGLDVWGQGTTVTVSS

SEQ ID NO: 18171 - protein, 125 aa, Artificial Sequence
  Synthetic polypeptide representing artificial human antibody VH domain
EVRLVESGGGLVQPGGSLKLSCTASEFTFSGSTIHWVRRAAGRGLEWVGRIRDKTNTYATTYAASVSGRFTISRDDAKTTAYLQMNSLKTEDTAVYYCASKETLRDFSYYYMDVWGKGTTVTVSS

SEQ ID NO: 18172 - protein, 123 aa, Artificial Sequence
  Synthetic polypeptide representing artificial human antibody VH domain
QVQLVESGGGVVQPGRSLRLSCAASGFAFSFYGMDWVRQAPDKGLEWVAAISSDGTNEFYADSVKGRFTISRDNSKNTLYLQMNNLRKEDAAVYYCTTAYCGGDCYPPFFDYWGPGTLVTVSS

SEQ ID NO: 18173 - protein, 130 aa, Artificial Sequence
  Synthetic polypeptide representing artificial human antibody VH domain
QVQLQESGPGLVKTSETLSLTCTVSGGSISSFHWNHWNWIRQTPGKGLEWIGYIYYTGFTESTLYNPSLASRVSISLDMSRNQFSLTLNSVTAADTAVYYCARRVRSDPVISSDNWLGPWGQGLLVTVSS

SEQ ID NO: 18174 - protein, 119 aa, Artificial Sequence
  Synthetic polypeptide representing artificial human antibody VH domain
QLQLQESGPGLVKPSEALSLTCSVSGVSTSSSDYYWGWIRQPPGKALEWLGSIYYSGSTLYNPSLKSRVTISVDTSKNQFSLRVSSVTASDTAVYYCVRQKGAVAPDFWGQGTLVTVSS

SEQ ID NO: 18175 - protein, 121 aa, Artificial Sequence
  Synthetic polypeptide representing artificial human antibody VH domain
EVQLVESGGGLMQPGGSLRISCAASGFSVSSNYISWVRQAPGKGLEWISVIYSADRTQYAESVKGRFTISRDTSKSTVFLQMDSLRVDDTAVYYCASPGGQCNGGTCYPYWGQGTLVTVSS

SEQ ID NO: 18176 - protein, 121 aa, Artificial Sequence
  Synthetic polypeptide representing artificial human antibody VH domain
QVQLVESGGGVVQPGRSLRLSCAASGFTFSSYGMHWVRQAPGKGLEWVAVIWYDGSNKYYVDSVKGRFTISRDNSKNTLYLQMNSLRAEDTAVYYCAREGIVGATTGFDPWGQGTLVTVSS

SEQ ID NO: 18177 - protein, 125 aa, Artificial Sequence
  Synthetic polypeptide representing artificial human antibody VH domain
EVQLVESGGGLVKPGGSLRLSCVGSGFTFSDYSMNWVRRAPGRGLEWVSSISSRSTYKDYADSVKGRFTISRDNAKNSLYLEMNNLRSEDTAVYYCARNHDYYDSSGYFLLVDYWGQGTLVTVPS

SEQ ID NO: 18178 - protein, 114 aa, Artificial Sequence
  Synthetic polypeptide representing artificial human antibody VH domain
QVQLVQSGAELKQPGASVKVSCQASGFTFTTSNIYWVRQAPGQRLEWLGWINIANGHTRYSQSLQGRIIFTRDTSANTVFMELSSLRSADTAVYFCARGTLGHWGQGTLVTVSS

SEQ ID NO: 18179 - protein, 121 aa, Artificial Sequence
  Synthetic polypeptide representing artificial human antibody VH domain
QVQLVESGGGAVQPGKSLRLSCATSGFPFTALGIHWVRQAPGRGLEWVAVLWSDGRNHYYADSVKDRFIVSRDNFMNTHYLQMHSLRVEDTAVYYCARAMGFLAHDWFDPWGQGTLVTVSS

SEQ ID NO: 18180 - protein, 119 aa, Artificial Sequence
  Synthetic polypeptide representing artificial human antibody VH domain
QVQLVQSGAEVKKPGASVKVSCKASGYTFTGYDINWVRQATGQGLEWMGWMKPYSGNTGYAQKFQGRVTMTRDTSISTAYMELSSLRSEDTAVYYCAREMSSITTTGHWGQGTLVTVSS

SEQ ID NO: 18181 - protein, 124 aa, Artificial Sequence
  Synthetic polypeptide representing artificial human antibody VH domain
EVQLLASGGGLVPPGGSLRLSCAASGFTFSDYAISWVRRAPGKGLEWVSAIGGTGSSTFYADSVKGRFTVSKDHSTKTVFLQMESLTAEDSAIYYCSGYCRGGSCAGHGSFDFWGRGTLVTVSS

SEQ ID NO: 18182 - protein, 123 aa, Artificial Sequence
  Synthetic polypeptide representing artificial human antibody VH domain
QLQLQESGPGLVKPSETLSLTCTVSGGSVTNRTYYWGWIRQPPGKGLECIGSIYYSGSTYSNPSLRSRATISVDASKNQFSLRLNSVTAADTAVYYCARHGLRFGAFDPFDIWGQGTTVTVSS

SEQ ID NO: 18183 - protein, 126 aa, Artificial Sequence
  Synthetic polypeptide representing artificial human antibody VH domain
QVQLVESGGGVVQPGGSLRLSCAASGFTFSNYGMHWVRQAPGKGLEWVGLIWYDGRNKEYSDSVKGRFTISRENSKNTMYLQMNSLRGEDTAVYYCARAEGYSGHNYVYYYGMDVWGQGTTVTVSS

SEQ ID NO: 18184 - protein, 118 aa, Artificial Sequence
  Synthetic polypeptide representing artificial human antibody VH domain
QVHLEQSGAEVKKPGASVKVSCRVFGYTFTGYYFHWVRQAPGHGLEWMGWMNSNSGGINLRQKFLGRVTMTRDTSINTVYMELTSLTSDDTAMYYCTSGPGSFQIDYWGQGTLVTVSP

SEQ ID NO: 18185 - protein, 128 aa, Artificial Sequence
  Synthetic polypeptide representing artificial human antibody VH domain
QVQLQQWGAGLLKPSETLSLTCAVYGGSFSGYYWSWIRQPPGKGLEWIGEINHSGSTNYNPSLKSRVTISVDTSKNQFSLKLSSVTAADTAVYYCARGKRGAVAGILLPYYYYGMDVWGQGTTVTVSS

SEQ ID NO: 18186 - protein, 121 aa, Artificial Sequence
  Synthetic polypeptide representing artificial human antibody VH domain
EVQLVESGGGLVQPGGSLRLSCAASGFTFSSYDMHWVRHTMGKGLEWVSTVDTAGDTFYRDSVKGRFTISRDNARDSFYLQLNSLTAGDTAVYFCVRGTVRGIITYSFHYWGQGTLVTVSS

SEQ ID NO: 18187 - protein, 129 aa, Artificial Sequence
  Synthetic polypeptide representing artificial human antibody VH domain
QLQLQESGPGLVKPSETLSLTCTVSGGSISSSSYYWGWIRQPPGKGLEWIGSIYYSGSTYYNPSLKSRVTISVDTSKNQFSLKLSSVTAADTAVYYCARRQANHIVLVIAILGGWFDPWGQGTLVTVSS

SEQ ID NO: 18188 - protein, 126 aa, Artificial Sequence
  Synthetic polypeptide representing artificial human antibody VH domain
EVQLVQSGAEVKKPGESLKISCKGSGYSFTTHWIGWVRQRPGKGLEWMGLIYPGDSDTRYSPSFLGQVSISADKSINTAYLQWSSLQASDTAMYFCARRARESSQQKLYWYYMDVWGKGTSVAVSS

SEQ ID NO: 18189 - protein, 123 aa, Artificial Sequence
  Synthetic polypeptide representing artificial human antibody VH domain
QLQLQESGPGLVKPSETLSLSCSVSGDSISTTNYYWGWIRQPPGKGLEWIATIAYSGATYYNPSLKSRVSISIDTSENRFSLRVTSAPAADTAADTAMYYCALQHSSGYWTHWGQGTLVTVSS

SEQ ID NO: 18190 - protein, 119 aa, Artificial Sequence
  Synthetic polypeptide representing artificial human antibody VH domain
QVQLQQWGAGLLRPSETLSLTCAVFGGSFSGYHWTWIRQPPGKGLEWIGEIHHDGGINYNPSLKSRVTISVDTSKNQFSLNLNSVTAADTAVYYCARGQHQEWPVGDYWGQGTLVTVSS

SEQ ID NO: 18191 - protein, 115 aa, Artificial Sequence
  Synthetic polypeptide representing artificial human antibody VH domain
EVQLVESGGGLVMPGGSLRLSCAASGFTFSSYWMYWVRQTPGKGLMYVSHINADGTSFAYADSVKGRFTISRDNMRNALYLDMNSLGADDAGVYYCAQLTTVTTWGQGTLVTVSS

SEQ ID NO: 18192 - protein, 127 aa, Artificial Sequence
  Synthetic polypeptide representing artificial human antibody VH domain
QLQLQESGPGLVKPSDTLSLTCNVSGGSIRGSRDYWGWMRQSPLKGLEWLGSIYHTGTSHYNPSLKSRVAISVDTSTNQFSLNLISVSAADTGVYYCAKTYYNSLTDYYNVYLMDVWGRGTTVTVSS

SEQ ID NO: 18193 - protein, 119 aa, Artificial Sequence
  Synthetic polypeptide representing artificial human antibody VH domain
QVQLVQSGAEVKQPGASVKVSCKASGYSFTGYYLHWVRQVPGQGLEWLGWINSNSGETNYAQKFQGRVTMTRDTSVMTAYMELSRLRSDDTAVYYCAREGGLNTIADYWGQGTLVTVSS

SEQ ID NO: 18194 - protein, 127 aa, Artificial Sequence
  Synthetic polypeptide representing artificial human antibody VH domain
QVQLVQSGAEVKKPGASVKVSCKASGYTFTGYYMHWVRQAPGQGLEWMGWINPNSGGTNYAQKFQGRVTMTRDTSISTAYMELSRLRSDDTAVYYCARDALRYFDGFGWVEGWFDPWGQGTLVTVSS

SEQ ID NO: 18195 - protein, 119 aa, Artificial Sequence
  Synthetic polypeptide representing artificial human antibody VH domain
QVQLQQRGEGLLKPSETLSLTCAVSGGSFSGYHWTWIRQSPGKGLEWIGEIHYEGRVNYNPSLESRATISVDTSKNQFSLDLISVTAADTGEYYCARGQYQTWPVGDYWGQGTLVTVSS

SEQ ID NO: 18196 - protein, 119 aa, Artificial Sequence
  Synthetic polypeptide representing artificial human antibody VH domain
EVQLEESGGGLVESGGSLRLSCAASGFTFSSYSFSWVRQAPGKGLEWVSFISDSGYYILYADSVQGRFTISRDSAKNSLTLQMNSLRVEDTALYYCARARGNSCYNDYWGQGTLVTVSS

SEQ ID NO: 18197 - protein, 126 aa, Artificial Sequence
  Synthetic polypeptide representing artificial human antibody VH domain
QLQLQESGPGQVKPSETLSLTCAVSGGSINRSRFLWGWIRQPPGKGLEWIGSIYYSGTTYYSPSLESRVTLVVDTSKNQFSLRLRSVTAADTALYYCARPGGYCRGNNCHDAFDTWGQGTMVTVSS

SEQ ID NO: 18198 - protein, 129 aa, Artificial Sequence
  Synthetic polypeptide representing artificial human antibody VH domain
EVRLVESGGGLVQPGGSLRLSCATSGFIFRTYEINWVRQAPGKGLEWISWISWINGDAANTLYADSVRGRFTIARHTANNSVSLHMERLTVEDTAIYYCTRETRPPVGGTHHFYGLDVWGQGTTVTVSS

SEQ ID NO: 18199 - protein, 128 aa, Artificial Sequence
  Synthetic polypeptide representing artificial human antibody VH domain
QVTLKESGPVLVKPTETLTLTCTVSGFSLSNARMGVSWIRQPPGKALEWLAHIFSNDEKSYSTSLKSRLTISKDTSKSQVVLTMTNMDPVDTATYYCARILFESEWLVQYNYYGMDVWGQGTTVTVSS

SEQ ID NO: 18200 - protein, 118 aa, Artificial Sequence
  Synthetic polypeptide representing artificial human antibody VH domain
EVQLVESGGGLVQPGGSLRLSCATSGFTFNAYWMTWVRQAPGKGLEWVASIKTDGSEEKYVESVRGRFTISRDTARNSLYLQMNSLRAEDSAVYYCARQVGWGRFDFWGQGILVTVSS

SEQ ID NO: 18201 - protein, 125 aa, Artificial Sequence
  Synthetic polypeptide representing artificial human antibody VH domain
QVQLVQSGPELKKPGASLEVSCKTSGYPFTDFGLSWVRQAPGQGLEWLGWIAPRNGWTHYAEKFKGRVTITTDTSTGTAFLKLGGLGPDDSAVYYCATDIGSRSGGYLSRETDYWGQGTLVTVSS

SEQ ID NO: 18202 - protein, 124 aa, Artificial Sequence
  Synthetic polypeptide representing artificial human antibody VH domain
EVQLLESGGDLVQPGESLRLSCAASGFSFSFYAMSWVRQPPGKGLQWVSSISGGGDATYYADSVKGRFSISRDNSKNMLYLLVNTLRADDTAIYYCAKDWENFQSCGSDCLQSWGQGTLVTVSS

SEQ ID NO: 18203 - protein, 126 aa, Artificial Sequence
  Synthetic polypeptide representing artificial human antibody VH domain
EVQLVESGGGLVQPGGSLRLSCAASGFTFSSYEMNWVRQAPGKGLEWVSYISSSGSTIYYADSVKGRFTISRDNAKNSLYLQMNSLRAEDTAVYYCARGVIYGSGSYLAPSWFDSWGQGTLVTVSS

SEQ ID NO: 18204 - protein, 119 aa, Artificial Sequence
  Synthetic polypeptide representing artificial human antibody VH domain
EVQLVQSGGGLVQPGGSLRLSCAASGVTFTRYSINWVRQAPGKGLEWLSYISSSSDNIYYADSVTGRFTVSRDNAKNSAILQMNSLRDEDTAVYYCARGGDFGDYGNYWGQGTLVTVSS

SEQ ID NO: 18205 - protein, 120 aa, Artificial Sequence
  Synthetic polypeptide representing artificial human antibody VH domain
QVHLQQWGSGLVKPSETVSLTCAVYGGAFRGHYWTWVRQSPGRGLEWIGEVNQNGNTAYNPSVESRVTISVDRTRSQFSLRLTSATGADTGIYYCARGTVRAPGAPFDEWGQGSQVLVSS

SEQ ID NO: 18206 - protein, 117 aa, Artificial Sequence
  Synthetic polypeptide representing artificial human antibody VH domain
QVQLQESGPGLVKPSETLSLTCTVSGGSISSYYWSWIRQPPGKGLEWIGYIYYSGSTNYNPSLKSRVTISVDTSKNQFSLKLSSVTAADTAVYYCAEGGSGSYFDYWGQGTLVTVSS

SEQ ID NO: 18207 - protein, 128 aa, Artificial Sequence
  Synthetic polypeptide representing artificial human antibody VH domain
QVQLQESGPGLVKPSQTLSLTCTVSGGSISSGGYYWSWIRQHPGKGLEWIGYIYYSGSTYYNPSLKSRVTISVDTSKNQFSLKLSSVTAADTAVYYCAREHLGYCSSTSCYTGAFDIWGQGTMVTVSS

SEQ ID NO: 18208 - protein, 127 aa, Artificial Sequence
  Synthetic polypeptide representing artificial human antibody VH domain
QVQLQESGPGLVKPSQTLSLTCTVSGGSISSGGYYWSWIRQHPGKGLEWIGYIYYSGSTYYNPSLKSRVTISVDTSKNQFSLKLSSVTAADTAVYYCARANYWVVVPAAIHNWFDPWGQGTLVTVSS

SEQ ID NO: 18209 - protein, 130 aa, Artificial Sequence
  Synthetic polypeptide representing artificial human antibody VH domain
QVQLQESGPGLVKPSQTLSLTCTVSGGSISSGGYYWSWIRQHPGKGLEWIGYIYYSGSTYYNPSLKSRVTISVDTSKNQFSLKLSSVTAADTAVYYCARAPMPSITIFGVVITHWYFDLWGRGTLVTVSS

SEQ ID NO: 18210 - protein, 121 aa, Artificial Sequence
  Synthetic polypeptide representing artificial human antibody VH domain
QVQLVESGGGVVQPGRSLRLSCAASGFTFSSYAMHWVRQAPGKGLEWVAVISYDGSNKYYADSVKGRFTISRDNSKNTLYLQMNSLRAEDTAVYYCARSSSGSYLSAFDIWGQGTMVTVSS

SEQ ID NO: 18211 - protein, 127 aa, Artificial Sequence
  Synthetic polypeptide representing artificial human antibody VH domain
EVQLVESGGGLVKPGGSLRLSCAASGFTFSNAWMSWVRQAPGKGLEWVGRIKSKTDGGTTDYAAPVKGRFTISRDDSKNTLYLQMNSLKTEDTAVYYCTTDRVYDYVWGSYRPSDYWGQGTLVTVSS

SEQ ID NO: 18212 - protein, 133 aa, Artificial Sequence
  Synthetic polypeptide representing artificial human antibody VH domain
QVQLQQWGAGLLKPSETLSLTCAVYGGSFSDYYWTWIRQPPGKGLEWIGEINHSGYTNYIPSLKNRVTISVDTSKNQFSLKLNHVTAADTAVYYCVRGSGGHDFWTGFIQNRPYYHYYYMDAWGKGTTVTVSS

SEQ ID NO: 18213 - protein, 123 aa, Artificial Sequence
  Synthetic polypeptide representing artificial human antibody VH domain
EVQLVESGGGLIQPGGSLRLSCAASGFTVSSNYMSWVRQAPGKGLEWVSVIYSGGSTYYADSVKGRFTISRDNSKNTLYLQMNSLRAEDTAVYYCARDTRGYSYGLRGGMDVWGQGTTVTVSS

SEQ ID NO: 18214 - protein, 123 aa, Artificial Sequence
  Synthetic polypeptide representing artificial human antibody VH domain
QVQLVQSGAEVKKPGSSVKVSCKASGGTFSSYAISWVRQAPGQGLEWMGGIIPIFGTANYAQKFQGRVTITADESTSTAYMELSSLRSEDTAVYYCASYSGYDYGPPYGMDVWGQGTTVTVSS

SEQ ID NO: 18215 - protein, 123 aa, Artificial Sequence
  Synthetic polypeptide representing artificial human antibody VH domain
EVQLVESGGGLVKPGGSLRLSCAASGFTFSRYAMNWVRQAPGKGLEWVSSITGRSTFMYYADSVRGRFTVSRDNAKNSLFLQMDSLRAEDTAVYFCASGDYGSGNYEYYFDLWGQGTLVTVSS

SEQ ID NO: 18216 - protein, 128 aa, Artificial Sequence
  Synthetic polypeptide representing artificial human antibody VH domain
QVQLVQSGAEVKKPGASVKVSCKASGYTFTSYGISWVRQAPGQGLEWMGWISAYNGNTNYAQKLQGRVTMTTDTSTSTAYMELRSLRSDDTAVYYCARFSELLWFGELTSPYYGMDVWGQGTTVTVSS

SEQ ID NO: 18217 - protein, 122 aa, Artificial Sequence
  Synthetic polypeptide representing artificial human antibody VH domain
QLQLQESGPGLVKPSETLSLTCTVSGGSISSSSYYWGWIRQPPGKGLEWIGSIYYSGSTYYNPSLKSRVTISVDTSKNQFSLKLSSVTAADTAVYYCARHVRGYSYGSLDYWGQGTLVTVSS

SEQ ID NO: 18218 - protein, 131 aa, Artificial Sequence
  Synthetic polypeptide representing artificial human antibody VH domain
QVTLKESGPVLVKPTETLTLTCIVSGFSLSNDRMGVGWIRQPPGKALEWLAQIFSNDEKSYSASLKSRLTISKDTSKGQVVLTMTNMDPVDTGTYYCARIVFDPLPYSSNWYRDYYGLDVWGPGTTVTVSS

SEQ ID NO: 18219 - protein, 126 aa, Artificial Sequence
  Synthetic polypeptide representing artificial human antibody VH domain
EVQLVQSGAEVKKPGESLKISCKGSGYSFTSYWIGWVRQMPGKGLEWMGIIYPGDSDTRYSPSFQGQVTISADKSISTAYLQWSSLKASDTAMYYCARLSIGYSSGWYYYYGMDVWGQGTTVTVSS

SEQ ID NO: 18220 - protein, 125 aa, Artificial Sequence
  Synthetic polypeptide representing artificial human antibody VH domain
QLQLQESGPGLVKPSETLSLTCTVSGGSISSSSYYWGWIRQPPGKGLEWIGSIYYSGSTYYNPSLKSRVTISVDTSKNQFSLKLSSVTAADTAVYYCARQGEMWELPPSDWFDPWGQGTLVTVSS

SEQ ID NO: 18221 - protein, 118 aa, Artificial Sequence
  Synthetic polypeptide representing artificial human antibody VH domain
QVQLQGSGPGLVKPSETLSLTCAVSGASVRDEFWSWIRQTPGRRLEWIGWIAYSGRSNYNRSLKSRVSISVDTSKNQFSLKLTSVTAADTAFYFCARGGDSSKFFDYWGRGVLVTVSS

SEQ ID NO: 18222 - protein, 127 aa, Artificial Sequence
  Synthetic polypeptide representing artificial human antibody VH domain
QITLKESGPTLVKPTQTLTLTCTFSGFSLSTSGVGVGWIRQPPGKALEWLALIYWDDDKRYSPSLKSRLTITKDTSKNQVVLTMTNMDPVDTATYYCAHRHYYDSSGYYYLEAFDIWGQGTMVTVSS

SEQ ID NO: 18223 - protein, 122 aa, Artificial Sequence
  Synthetic polypeptide representing artificial human antibody VH domain
QVQLVESGGGVVQPGRSLRLSCVASGFTFTTYGMHWVRQAPGKGLEWVAMISFDGDKRDYADSVKGRFTISRDKSKNTLFLQMNSLRDEDTAIYFCALGGDYTSASRYFDYWGQGTRVTVSS

SEQ ID NO: 18224 - protein, 126 aa, Artificial Sequence
  Synthetic polypeptide representing artificial human antibody VH domain
EVHLLESGGDLVQPGGSLRLSCAASGFTFSNYAMSWVRQAPGKGLEWLSVISGTSGTRGRTFYADSVKDRFTISRDDSKNTLHLQMNSLRAEDTARYYCATLGNCGDTWCHTFDYWGQGTLVTVSP

SEQ ID NO: 18225 - protein, 121 aa, Artificial Sequence
  Synthetic polypeptide representing artificial human antibody VH domain
QVQLVESGGGVVQPGRSLRLSCAASGFTFSSYGMHWVRQAPGKGLEWVAVISYDGSNKYYADSVKGRFTISRDNSKNTLYLQMNSLRAEDTAVYYCAKTYSGSYFDAFDIWGQGTMVTVSS

SEQ ID NO: 18226 - protein, 133 aa, Artificial Sequence
  Synthetic polypeptide representing artificial human antibody VH domain
QVQLQQWGAGLLKPSETLSLTCAVYGGSFSDSYWTWVRQSPGKGLEWIGEINHSGGTNYSPSLKSRVTISVDTSKNQFSLKVRSLTAADSAVYYCARGSGGHDFWTGFIQNRPYYHYYYLDVWGRGTTVTVSS

SEQ ID NO: 18227 - protein, 120 aa, Artificial Sequence
  Synthetic polypeptide representing artificial human antibody VH domain
QVQLQESGPGLVKPSQTLSLTCTVSGGSISSGDYYWSWIRQPPGKGLEWIGYIYYSGSTYYNPSLKSRVTISVDTSKNQFSLKLSSVTAADTAVYYCARESRVWGYFDYWGQGTLVTVSS

SEQ ID NO: 18228 - protein, 128 aa, Artificial Sequence
  Synthetic polypeptide representing artificial human antibody VH domain
QVQLVESGGGVVQPGRSLRLSCAASGFTFSSYGMHWVRQAPGKGLEWVAVISYDGSNKYYADSVKGRFTISRDNSKNTLYLQMNSLRAEDTAVYYCAKEGAKGYSSGWIYYYYGMDVWGQGTTVTVSS

SEQ ID NO: 18229 - protein, 120 aa, Artificial Sequence
  Synthetic polypeptide representing artificial human antibody VH domain
EVQLVESGGGLVKPGGSLRLSCAASGFTFSSYSMNWVRQAPGKGLEWVSSISSSSSYIYYADSVKGRFTISRDNAKNSLYLQMNSLRAEDTAVYYCARDDMTTYDAFDIWGQGTMVTVSS

SEQ ID NO: 18230 - protein, 121 aa, Artificial Sequence
  Synthetic polypeptide representing artificial human antibody VH domain
EVQLVQSGAEVKKPGESLKISCKGSGYSFTSYWIGWVRQMPGKGLEWMGIIYPGDSDTRYSPSFQGQVTISADKSISTAYLQWSSLKASDTAMYYCASALTYSSSWGFDYWGQGTLVTVSS

SEQ ID NO: 18231 - protein, 128 aa, Artificial Sequence
  Synthetic polypeptide representing artificial human antibody VH domain
QVQLVQSGAEVKKPGSSVKVSCKASGGTFSSYAISWVRQAPGQGLEWMGGIIPIFGTANYAQKFQGRVTITADESTSTAYMELSSLRSEDTAVYYCARGRYDILTGYYSYYYYGMDVWGQGTTVTVSS

SEQ ID NO: 18232 - protein, 123 aa, Artificial Sequence
  Synthetic polypeptide representing artificial human antibody VH domain
QVELVQSGAEVKKPGSSVTVSCRASGGTFNKYGISWVRQAPGQGLEWMGGSMPMYGATHYAQKFQDRVSITADESTSTFYMELSGLTFADTAVYYCAEGNLFYSGWYNWLDPWGQGTPVLVSS

SEQ ID NO: 18233 - protein, 124 aa, Artificial Sequence
  Synthetic polypeptide representing artificial human antibody VH domain
QVQLVQSGAEVKKPGSSVKVSCKASGGTFSSYAISWVRQAPGQGLEWMGGIIPIFGTANYAQKFQGRVTITADESTSTAYMELSSLRSEDTAVYYCAREQVGATNQGDFYFDYWGQGTLVTVSS

SEQ ID NO: 18234 - protein, 128 aa, Artificial Sequence
  Synthetic polypeptide representing artificial human antibody VH domain
QVQLVQSGAEVKKPGSSVKVSCKASGGTFSSYAISWVRQAPGQGLEWMGGIIPIFGTANYAQKFQGRVTITADESTSTAYMELSSLRSEDTAVYYCARVTSGLYGSGSYSPVNWFDPWGQGTLVTVSS

SEQ ID NO: 18235 - protein, 118 aa, Artificial Sequence
  Synthetic polypeptide representing artificial human antibody VH domain
QVQLVASGGGVVQPGRSLRLSCAPSGFSLSRFGMHWVRQAPGKGLEWVALIYYDGSRELYADSVKGRFTVSRRNSDNTLYLQMSGLRAEDTALYYCVRVALDGHLDLWGQGTLVTVSS

SEQ ID NO: 18236 - protein, 120 aa, Artificial Sequence
  Synthetic polypeptide representing artificial human antibody VH domain
EVQLVQSGAEVKKPGESLKISCKGSGYSFTSYWIGWVRQMPGKGLEWMGIIYPGDSDTRYSPSFQGQVTISADKSISTAYLQWSSLKASDTAMYYCARHFEHDSSVLQHWGQGTLVTVSS

SEQ ID NO: 18237 - protein, 122 aa, Artificial Sequence
  Synthetic polypeptide representing artificial human antibody VH domain
EVQLLESGGRVVQPGGSLRLSCVASGFTFSNYVMSWVRQAPGKGLEWVSAISGRGENTYNADSLKGRFTISRDNSRNTVFLQIDRLRAEDTAVYYCAKGDCTGDCYYYFDFWGHGTRVTVSS

SEQ ID NO: 18238 - protein, 127 aa, Artificial Sequence
  Synthetic polypeptide representing artificial human antibody VH domain
QLQLQESGPGLVKPSETLSLTCTVSGGSISSSSYYWGWIRQPPGKGLEWIGSIYYSGSTYYNPSLKSRVTISVDTSKNQFSLKLSSVTAADTAVYYCARLPVEGSSSIYYYYGMDVWGQGTTVTVSS

SEQ ID NO: 18239 - protein, 124 aa, Artificial Sequence
  Synthetic polypeptide representing artificial human antibody VH domain
EVQLLESGGGLVQPGGSLRLSCAASGFTFSSYAMSWVRQAPGKGLEWVSAISGSGGSTYYADSVKGRFTISRDNSKNTLYLQMNSLRAEDTAVYYCAKAMSGTLTYYYYGMDVWGQGTTVTVSS

SEQ ID NO: 18240 - protein, 121 aa, Artificial Sequence
  Synthetic polypeptide representing artificial human antibody VH domain
QVQLVQSGSELKKPGASVKVSCKASGYTFTSYAMNWVRQAPGQGLEWMGWINTNTGNPTYAQGFTGRFVFSLDTSVSTAYLQISSLKAEDTAVYYCALLTGTHYYYGMDVWGQGTTVTVSS

SEQ ID NO: 18241 - protein, 120 aa, Artificial Sequence
  Synthetic polypeptide representing artificial human antibody VH domain
EVQLVESGGGLVQPGGSLRLSCSASGFTFSTYRMHWVRQAPGKGLIWVSRSDGSKRDYADSVKGRFTVSRDNAQNTFFLHMNSLRVDDTAVYYCARDRGAGGHDWGFDYWGQGTLVTVSS

SEQ ID NO: 18242 - protein, 122 aa, Artificial Sequence
  Synthetic polypeptide representing artificial human antibody VH domain
QVQLVQSGAEVKKPGASVKVSCKVSGYTLTELSMHWVRQAPGKGLEWMGGFDPEDGETIYAQKFQGRVTMTEDTSTDTAYMELSSLRSEDTAVYYCASNYAYNWNHKHFDYWGQGTLVTVSS

SEQ ID NO: 18243 - protein, 121 aa, Artificial Sequence
  Synthetic polypeptide representing artificial human antibody VH domain
QLQLQESGSGLVEPSQTLSLTCAVSGGSMSGSGYTWSWLRQPPGQDLEWIGYIYDTGNTYYKPSLKSRITISIDTSDNQFSLTLSSVTAADTAVYYCARGSNIVDWYFDLWGRGTLVTVSS

SEQ ID NO: 18244 - protein, 120 aa, Artificial Sequence
  Synthetic polypeptide representing artificial human antibody VH domain
EVQLVESGGGLIQPGGSLRLSCAASGFTVSSNYMSWVRQAPGKGLEWVSVIYSGGSTYYADSVKGRFTISRDNSKNTLYLQMNSLRAEDTAVYYCARYDSSGYFNWFDPWGQGTLVTVSS

SEQ ID NO: 18245 - protein, 121 aa, Artificial Sequence
  Synthetic polypeptide representing artificial human antibody VH domain
QITLKESGPTLVKPTQTLTLTCTFSGFSLSTSGVGVGWIRQPPGKALEWLALIYWDDDKRYSPSLKSRLTITKDTSKNQVVLTMTNMDPVDTATYYCAHRPAAILGWFDPWGQGTLVTVSS

SEQ ID NO: 18246 - protein, 131 aa, Artificial Sequence
  Synthetic polypeptide representing artificial human antibody VH domain
QVTLRESGPALVKPTQTLTLTCTFSGFSLSTSGMCVSWIRQPPGKALEWLALIDWDDDKYYSTSLKTRLTISKDTSKNQVVLTMTNMDPVDTATYYCARNPVRGFGELNPDGYYYYGMDVWGQGTTVTVSS

SEQ ID NO: 18247 - protein, 121 aa, Artificial Sequence
  Synthetic polypeptide representing artificial human antibody VH domain
QVQLVQSGAEVKKPGSSVKVSCKASGGTFRKYDFTWVRQAPGQGLEWMGGIIPLFGKPNYGQRFQGRVTLTADESTSTGYMEMTNLRSEDTAVYYCARINWNEGYNYIDVWGKGTTVTVSS

SEQ ID NO: 18248 - protein, 133 aa, Artificial Sequence
  Synthetic polypeptide representing artificial human antibody VH domain
QVQLQQWGAGRLRPSETLSLTCAVYGGSFTENYWDWVRQPPGKGLEWIGEINHGGATSYNMSLKSRVTISVDASKSQFSLNLRSVTVADTAVYYCVRARRSRSTSSWFQLSPPNYYYYYMDVWGKGTTVTVSS

SEQ ID NO: 18249 - protein, 119 aa, Artificial Sequence
  Synthetic polypeptide representing artificial human antibody VH domain
EVQLLESGGGLVQPGGSLRLSCAASGFTFSSYAMSWVRQAPGKGLEWVSAISGSGGSTYYADSVKGRFTISRDNSKNTLYLQMNSLRAEDTAVYYCAKASGNSADFDYWGQGTLVTVSS

SEQ ID NO: 18250 - protein, 135 aa, Artificial Sequence
  Synthetic polypeptide representing artificial human antibody VH domain
QVQLVESGGGVVQPGRSLRLSCAASGFTFSSYGMHWVRQAPGKGLEWVAVIWYDGSNKYYADSVKGRFTISRDNSKNTLYLQMNSLRAEDTAVYYCARDSLAGDIVVVPAAIGISPLPHYGMDVWGQGTTVTVSS

SEQ ID NO: 18251 - protein, 127 aa, Artificial Sequence
  Synthetic polypeptide representing artificial human antibody VH domain
QVQLVQSGSELKKPGASVKVSCKASGYTFTSYAMNWVRQAPGQGLEWMGWINTNTGNPTYAQGFTGRFVFSLDTSVSTAYLQISSLKAEDTAVYYCARGYDILTGYYNVYYYGMDVWGQGTTVTVSS

SEQ ID NO: 18252 - protein, 130 aa, Artificial Sequence
  Synthetic polypeptide representing artificial human antibody VH domain
EVQLVESGGGLVKPGGSLRLSCAASGFTFSSYSMSWVRQAPGEGLEWVSSINSISTNIHYTDSVKGRFTISRDNAKNSLFLQMNSLTADDTAVYYCARDFARGSSWYGGSEDYYYGLDVWGQGTTVTVSS

SEQ ID NO: 18253 - protein, 119 aa, Artificial Sequence
  Synthetic polypeptide representing artificial human antibody VH domain
QVQLVESGGALVTPGGSLRLSCAVNGLPLSDSYMSWIRQAPGKGLEWVAFSSRRDDTRYYLDSVKGRFTISKDYAKNTLILQMNSLRAEDTAVYYCARALSGYNFFDFWGQGTLVTVSS

SEQ ID NO: 18254 - protein, 121 aa, Artificial Sequence
  Synthetic polypeptide representing artificial human antibody VH domain
EVQLLESGGGLVQPGGSLRLSCAASGFTFSSSAMSWVRQVPGKGLEWVASISSRDSTTPYTESVKGRFTISRDNSKNMLYLQMNGLRAEDTAVYYCAKCTSFCQYKWFEAWGQGTLVTVSS

SEQ ID NO: 18255 - protein, 118 aa, Artificial Sequence
  Synthetic polypeptide representing artificial human antibody VH domain
EVQLVESGGGLVQPGGSLRLSCAASGFTFSSYSMNWVRQAPGKGLEWVSYISSSSSTIYYADSVKGRFTISRDNAKNSLYLQMNSLRDEDTAVYYCARAGSYYPFDYWGQGTLVTVSS

SEQ ID NO: 18256 - protein, 134 aa, Artificial Sequence
  Synthetic polypeptide representing artificial human antibody VH domain
QVQLVQSGAEVKKPGASVKVSCKASGYTFTSYYMHWVRQAPGQGLEWMGIINPSGGSTSYAQKFQGRVTMTRDTSTSTVYMELSSLRSEDTAVYYCARDLEAPVSYDFWSVMEGGYYYYYMDVWGKGTTVTVSS

SEQ ID NO: 18257 - protein, 125 aa, Artificial Sequence
  Synthetic polypeptide representing artificial human antibody VH domain
EVQLVESGGGLVQPGRSLRLSCAASGFTFDDYAMHWVRQAPGKGLEWVSGISWNSGSIGYADSVKGRFTISRDNAKNSLYLQMNSLRAEDTALYYCAKVYSSSWWGVAVAGYDYWGQGTLVTVSS

SEQ ID NO: 18258 - protein, 120 aa, Artificial Sequence
  Synthetic polypeptide representing artificial human antibody VH domain
EVQLLESGGGLVQPGGSLRLSCAASGFTFSSYAMSWVRQAPGKGLEWVSAISGSGGSTYYADSVKGRFTISRDNSKNTLYLQMNSLRAEDTAVYYCAKVEGATSTGFDYWGQGTLVTVSS

SEQ ID NO: 18259 - protein, 127 aa, Artificial Sequence
  Synthetic polypeptide representing artificial human antibody VH domain
EVQLLESGGGLVQPGGSLRLSCAASGFTFSSYAMSWVRQAPGKGLEWVSAISGSGGSTYYADSVKGRFTISRDNSKNTLYLQMNSLRAEDTAVYYCAKVNDFWSGYPYYYYYYMDVWGKGTTVTVSS

SEQ ID NO: 18260 - protein, 131 aa, Artificial Sequence
  Synthetic polypeptide representing artificial human antibody VH domain
EVQLVESGGGLVQPGGSLRLSCAASGFTFSSYSMNWVRQAPGKGLEWVSYISSSSSTIYYADSVKGRFTISRDNAKNSLYLQMNSLRDEDTAVYYCAREPPRGYCSSTSWARLCYYGMDVWGQGTTVTVSS

SEQ ID NO: 18261 - protein, 120 aa, Artificial Sequence
  Synthetic polypeptide representing artificial human antibody VH domain
QVQLVQSGAEVKKPGASVKVSCKASGYTFTGYYMHWVRQAPGQGLEWMGWINPNSGGTNYAQKFQGRVTMTRDTSISTAYMELSRLRSDDTAVYYCATASTSWRHWFDPWGQGTLVTVSS

SEQ ID NO: 18262 - protein, 127 aa, Artificial Sequence
  Synthetic polypeptide representing artificial human antibody VH domain
QVQLVESGGGVVQPGRSLRLSCAASGFTFSSYGMHWVRQAPGKGLEWVAVIWYDGSNKYYADSVKGRFTISRDNSKNTLYLQMNSLRAEDTAVYYCARDQRGDYDILTSYYYGMDVWGQGTTVTVSS

SEQ ID NO: 18263 - protein, 120 aa, Artificial Sequence
  Synthetic polypeptide representing artificial human antibody VH domain
QVQLVQSGAEVKKPGASVKVSCKASGFTFTDYYMHWLRQAPGQGLEWVGCTHPNSRGATFAPNFQGRVTVTEDTSINTVYMELNSLTSDDTAIFFCAREEFHANKAFDYWGQGTRVTVSS

SEQ ID NO: 18264 - protein, 121 aa, Artificial Sequence
  Synthetic polypeptide representing artificial human antibody VH domain
EVQLLESGGGLVQPGGSLRLSCAASGFTFSSYAMSWVRQAPGKGLEWVSAISGSGGSTYYADSVKGRFTISRDNSKNTLYLQMNSLRAEDTAVYYCAKDLGGYYGSGRDYWGQGTLVTVSS

SEQ ID NO: 18265 - protein, 124 aa, Artificial Sequence
  Synthetic polypeptide representing artificial human antibody VH domain
EVQLVESGGGLVKPGGSLRLSCAASGFTFSSYSMNWVRQAPGKGLEWVSSISSSSSYIYYADSVKGRFTISRDNAKNSLYLQMNSLRAEDTAVYYCAREPHSSSWYIKYYFDYWGQGTLVTVSS

SEQ ID NO: 18266 - protein, 130 aa, Artificial Sequence
  Synthetic polypeptide representing artificial human antibody VH domain
QVQLQESGPGLVKPSQTLSLTCTVSGGSISSGGYYWSWIRQHPGKGLEWIGYIYYSGSTYYNPSLKSRVTISVDTSKNQFSLKLSSVTAADTAVYYCARDSAGRYDILTGYIKDNWFDPWGQGTLVTVSS

SEQ ID NO: 18267 - protein, 129 aa, Artificial Sequence
  Synthetic polypeptide representing artificial human antibody VH domain
QLQLQESGPGLVRPSETLSLTCTVSGGSISSSNHYWGWVRQPPGKGLEWIGTVYYSGSTYYNPSLKSRVTISVDTSKNQFSLNLSSLTAADTAVYHCARQRDTYYHGSQTYFLDYFDFWGQGTPVTVSS

SEQ ID NO: 18268 - protein, 125 aa, Artificial Sequence
  Synthetic polypeptide representing artificial human antibody VH domain
QVQLQESGPGLVKPSQTLSLTCTVSGGSISSGGYYWSWIRQHPGKGLEWIGYIYYSGSTYYNPSLKSRVTISVDTSKNQFSLKLSSVTAADTAVYYCARNYYDSSGYYFYGMDVWGQGTTVTVSS

SEQ ID NO: 18269 - protein, 128 aa, Artificial Sequence
  Synthetic polypeptide representing artificial human antibody VH domain
QVQLVESGGGVVQPGRSLRLSCAASGFTFSSYAMHWVRQAPGKGLEWVAVISYDGSNKYYADSVKGRFTISRDNSKNTLYLQMNSLRAEDTAVYYCARDNFQPLGYCSSTSCYGLDYWGQGTLVTVSS

SEQ ID NO: 18270 - protein, 131 aa, Artificial Sequence
  Synthetic polypeptide representing artificial human antibody VH domain
QVQLVESGGGVVQPGRSLRLSCAASGFTFSSYAMHWVRQAPGKGLEWVAVISYDGSNKYYADSVKGRFTISRDNSKNTLYLQMNSLRAEDTAVYYCARDGGGRYCSGGSCYVYYYYGMDVWGQGTTVTVSS

SEQ ID NO: 18271 - protein, 121 aa, Artificial Sequence
  Synthetic polypeptide representing artificial human antibody VH domain
EVQMVESGGGLVKPGGSLRLSCTASGFRFSLYSMSWVRQAPGKGLEWVSAISDSSNFIYYADSVRGRFTLSRDNAKNALYLQMDSLRAEDTAVYYCARDRGGYPLYVFDLWGLGALVTVSS

SEQ ID NO: 18272 - protein, 120 aa, Artificial Sequence
  Synthetic polypeptide representing artificial human antibody VH domain
QVQLVESGGGVVQPGRSLRLSCVASGLTFSRYAMHWVRQAPGKGLEWLAVISYEGSTKNYPDSVKGRFSISRENSKNTLYLEMKSLRVEDTAVYYCARGASNSNNAFDTWGLGTMVTVSS

SEQ ID NO: 18273 - protein, 118 aa, Artificial Sequence
  Synthetic polypeptide representing artificial human antibody VH domain
EVQLLESGGGLVQSGGSLRLSCTASEFIFNNYAMSWVRQAPGEGLEWVSTISSTGDNTYYADSVKGRFTISRDNSKNTLVLQMSSLRVEDTAVYYCMKGGWGTVIDHWGQGTLVSVSS

SEQ ID NO: 18274 - protein, 130 aa, Artificial Sequence
  Synthetic polypeptide representing artificial human antibody VH domain
EVKLVESGGGLVKPGGSLRLSCAASGFSFDNAWMSWVRQAPGKGLEWVGRIETEADGGTTEYAAPVKGRFTISRDDSKNTLYLQMNSLKAEDTAVYYCTTDGLTLATFCSGENCPWNIYWGQGTLVTVSS

SEQ ID NO: 18275 - protein, 125 aa, Artificial Sequence
  Synthetic polypeptide representing artificial human antibody VH domain
QVQLVQSGAEVKKPGSSVKVSCKASGGTFSSYAISWVRQAPGQGLEWMGGIIPIFGTANYAQKFQGRVTITADESTSTAYMELSSLRSEDTAVYYCARDGMGVLGITPSNWFDPWGQGTLVTVSS

SEQ ID NO: 18276 - protein, 120 aa, Artificial Sequence
  Synthetic polypeptide representing artificial human antibody VH domain
QVQLVQSGAEVKEPGASVKVSCKASGFTLTGYYMHWMRQAPGQGLEWVGCTHPNSGGATYAPKFQGRVTVTEDTSISTVYMELSSLRSDDTALYYCAREVVIANKAFDYWGQGTLVTVSS

SEQ ID NO: 18277 - protein, 123 aa, Artificial Sequence
  Synthetic polypeptide representing artificial human antibody VH domain
EVQLLESGGGLGQPGWSLRLSCGASGFRFRSYAMSWVRRAPGKGLEWVSTISSGGGSTFYAESVKGRFTISRDNSNNTLYLQMDGLRAEDTAIYQCVKNRYSGGDSRDYFDSWGQGTLVTVSS

SEQ ID NO: 18278 - protein, 122 aa, Artificial Sequence
  Synthetic polypeptide representing artificial human antibody VH domain
EVQLVESGGGLVKPGGSLRLSCAASGFTFSSYSMNWVRQAPGKGLEWVSSISSSSSYIYYADSVKGRFTISRDNAKNSLYLQMNSLRAEDTAVYYCARDEYYDILTGYYSYWGQGTLVTVSS

SEQ ID NO: 18279 - protein, 121 aa, Artificial Sequence
  Synthetic polypeptide representing artificial human antibody VH domain
QVQLQESGPGLVKPSQTLSLTCTVSGGSISSGGYYWSWIRQHPGKGLEWIGYIYYSGSTYYNPSLKSRVTISVDTSKNQFSLKLSSVTAADTAVYYCARSIVGATWYFDYWGQGTLVTVSS

SEQ ID NO: 18280 - protein, 117 aa, Artificial Sequence
  Synthetic polypeptide representing artificial human antibody VH domain
EVQLVESGGGLVQPGGSLRLSCAASGFTFSSYSMNWVRQAPGKGLEWVSYISSSSSTIYYADSVKGRFTISRDNAKNSLYLQMNSLRDEDTAVYYCARDIGGYFDYWGQGTLVTVSS

SEQ ID NO: 18281 - protein, 132 aa, Artificial Sequence
  Synthetic polypeptide representing artificial human antibody VH domain
QVQLQESGPGLLKPSESLSLTCTVSGDSINQYQWSWIRQPPGKGLEWIGHISNSGSTNSNPSLESRVTMSVDTSSNHFSLWLSSVTAADTAVYYCARMMAGGGTNMVRGRLIDFYYHYVDVWGKGTTVTVSS

SEQ ID NO: 18282 - protein, 128 aa, Artificial Sequence
  Synthetic polypeptide representing artificial human antibody VH domain
QVQLVQSGGEVKKPGASVKVSCKTSGYTFSTFGITWVRQAPGQGLEWMGWISPYSGVTKSAQSFQGRATMTTDKSTRTVYMELRSLRSDDTAIYYCARDRSGGSGNYLDLSTYYFDFWGQGTLVTVSS

SEQ ID NO: 18283 - protein, 129 aa, Artificial Sequence
  Synthetic polypeptide representing artificial human antibody VH domain
QLQLQVSGPGLVKPSETLSLTCTVSGGSISINNHYWGWIRQPPGKGLEWIGTIYYSGSTYYNPSLKSRVTMSVDTSKNQFSLKLSSLTAADTAIYYCARQRDTYYYGSQNYFLDYFDHWGQGTLVTVSS

SEQ ID NO: 18284 - protein, 122 aa, Artificial Sequence
  Synthetic polypeptide representing artificial human antibody VH domain
QLQLQESGPGLVKPSETLSLTCTVSGGSISSSSYYWGWIRQPPGKGLEWIGSIYYSGSTYYNPSLKSRVTISVDTSKNQFSLKLSSVTAADTAVYYCASPPYCSGGSCRDYWGQGTLVTVSS

SEQ ID NO: 18285 - protein, 123 aa, Artificial Sequence
  Synthetic polypeptide representing artificial human antibody VH domain
EVQLVESGGVVVQPGGSLRLSCAASGFTFDDYTMQWVRQAPGKGLEWVSLITWNGGSTSYADSVKGRFTISRDNSKNSLYLEMNSLRIEDTAVYYCVKEARDAYYAVDYFDYWGQGTQVTVSS

SEQ ID NO: 18286 - protein, 123 aa, Artificial Sequence
  Synthetic polypeptide representing artificial human antibody VH domain
QVQLQESGPGLVKPSQTLSLTCTVSGGSISSGGYYWSWIRQHPGKGLEWIGYIYYSGSTYYNPSLKSRVTISVDTSKNQFSLKLSSVTAADTAVYYCARSYSGYDSDDAFDIWGQGTMVTVSS

SEQ ID NO: 18287 - protein, 121 aa, Artificial Sequence
  Synthetic polypeptide representing artificial human antibody VH domain
EVQLGESGGGLVKPGGSLRLSCAASGFTFSSYNMNWVRQTPGRGLEWVSSISGSGSHVYYAKSLKGRVTISRDNAKNALYLQIYSLRAEDTAVYYCAPSFGVGSGFDMDVWGKGTTVTVSS

SEQ ID NO: 18288 - protein, 124 aa, Artificial Sequence
  Synthetic polypeptide representing artificial human antibody VH domain
QVQLVQSGAEVKKPGASVKVSCKASGYTFTSYYMHWVRQAPGQGLEWMGIINPSGGSTSYAQKFQGRVTMTRDTSTSTVYMELSSLRSEDTAVYYCARDTSDCSGGSCYWFDYWGQGTLVTVSS

SEQ ID NO: 18289 - protein, 128 aa, Artificial Sequence
  Synthetic polypeptide representing artificial human antibody VH domain
EVQLVESGGGLVKPGGSLRLSCAASGFTFSNAWMSWVRQAPGKGLEWVGRIKSKTDGGTTDYAAPVKGRFTISRDDSKNTLYLQMNSLKTEDTAVYYCTTDPQKVYCSSTSCYIWDYWGQGTLVTVSS

SEQ ID NO: 18290 - protein, 120 aa, Artificial Sequence
  Synthetic polypeptide representing artificial human antibody VH domain
QVQLQESGPGLVKPSETPSLTCTVSGGSISSYLWNWVRQPPGKELEWIGYSHYSGSSNYNPSLKSRVTISLDTSKNQVSLKVKSVTAEDSAVYYCARGGYTAGPNAFDIWGPGTTVLVSS

SEQ ID NO: 18291 - protein, 133 aa, Artificial Sequence
  Synthetic polypeptide representing artificial human antibody VH domain
QVQLVESGGGVVQPGRSLRLSCAASGFTFSSYAMHWVRQAPGKGLEWVAVISYDGSNKYYADSVKGRFTISRDNSKNTLYLQMNSLRAEDTAVYYCARDITYYDILTGYFQPAYYYYYGMDVWGQGTTVTVSS

SEQ ID NO: 18292 - protein, 116 aa, Artificial Sequence
  Synthetic polypeptide representing artificial human antibody VH domain
QVQLVESGGGVVQPGRSLRLSCAASGFTFSSYAMHWVRQAPGKGLEWVAVISYDGSNKYYADSVKGRFTISRDNSKNTLYLQMNSLRAEDTAVYYCARGGPWFDPWGQGTLVTVSS

SEQ ID NO: 18293 - protein, 122 aa, Artificial Sequence
  Synthetic polypeptide representing artificial human antibody VH domain
QVQLVESGGGVVQPGRSLRLSCAASGFTFSSYGMHWVRQAPGKGLEWVAVISYDGSNKYYADSVKGRFTISRDNSKNTLYLQMNSLRAEDTAVYYCAKGELPAAMTVGFDYWGQGTLVTVSS

SEQ ID NO: 18294 - protein, 121 aa, Artificial Sequence
  Synthetic polypeptide representing artificial human antibody VH domain
QVQLVQSGSELKKPGASVKVSCKASGYTFTSYAMNWVRQAPGQGLEWMGWINTNSGNPTYAQGFTGRFVFSLDTSVSTAYLQISSLESEDTAVYYCARGGGRIAATVVGYWGQGTLVTVSS

SEQ ID NO: 18295 - protein, 127 aa, Artificial Sequence
  Synthetic polypeptide representing artificial human antibody VH domain
QVQLVESGGGVVHPGRSLRLSCAASGFTFTSHGLHWVRQAPGKGLEWVASISFDGKKIHYADSAQGRFTISRDNPKNTFYLQTTNLRPEDTAVYYCAKDGIKSVRGAVYYNYGLNVWGQGTSVIVSS

SEQ ID NO: 18296 - protein, 137 aa, Artificial Sequence
  Synthetic polypeptide representing artificial human antibody VH domain
QVQLVESGGGVVQPGRSLRLSCAASGFTFSSYAMHWVRQAPGKGLEWVAVISYDGSNKYYADSVKGRFTISRDNSKNTLYLQMNSLRAEDTAVYYCARSSTRAPSTIDCSGGSCYPKPLYYYGMDVWGQGTTVTVSS

SEQ ID NO: 18297 - protein, 124 aa, Artificial Sequence
  Synthetic polypeptide representing artificial human antibody VH domain
QVQLQQWGAGLLKPSETLSLTCAVYGGSFSGYYWSWIRQPPGKGLEWIGEINHSGSTNYNPSLKSRVTISVDTSKNQFSLKLSSVTAADTAVYYCARFPYSSSSDPYYYYMDVWGKGTTVTVSS

SEQ ID NO: 18298 - protein, 129 aa, Artificial Sequence
  Synthetic polypeptide representing artificial human antibody VH domain
QLQLQESGPGLVKPSETLSLTCTVSGDSISSSSYYWGWIRQPPGKGLEWIGTISYSGSTYYNPSLKSRVTMSIDTSKNQFSLKLSSVTAADTAVHYCARQRGTYYYGSGTSYLDYFDYWGQGTLVTVSS

SEQ ID NO: 18299 - protein, 124 aa, Artificial Sequence
  Synthetic polypeptide representing artificial human antibody VH domain
EVQLVESGGGLVQPGGSLRLSCAASGFSISNYEMHWVRQAPGKGLEWVSRISSDGRSTRYAAAVQGRFTVSGDSAKNTLFLQISRLGAEDTALYYCARGSGRQLYYYFSYMDVWGKGTTVTVSS

SEQ ID NO: 18300 - protein, 123 aa, Artificial Sequence
  Synthetic polypeptide representing artificial human antibody VH domain
QVQLVQSGAEVKKPGSSVKVSCKASGGTFSSYAISWVRQAPGQGLEWMGGIIPIFGTANYAQKFQGRVTITADESTSTAYMELSSLRSEDTAVYYCARGGWTRNYYYYYMDVWGKGTTVTVSS

SEQ ID NO: 18301 - protein, 120 aa, Artificial Sequence
  Synthetic polypeptide representing artificial human antibody VH domain
QVQLVQSGSELKKPGASVKVSCKASGYTFTSYAMNWVRQAPGQGLEWMGWINTNTGNPTYAQGFTGRFVFSLDTSVSTAYLQISSLKAEDTAVYYCARSGYSSSWHFDYWGQGTLVTVSS

SEQ ID NO: 18302 - protein, 124 aa, Artificial Sequence
  Synthetic polypeptide representing artificial human antibody VH domain
QVQLVESGGGVVQPGRSLRLSCAASGFTFSSYGMHWVRQAPGKGLEWVAVIWYDGSNKYYADSVKGRFTISRDNSKNTLYLQMNSLRAEDTAVYYCARDLPVVGATASDAFDIWGQGTMVTVSS

SEQ ID NO: 18303 - protein, 129 aa, Artificial Sequence
  Synthetic polypeptide representing artificial human antibody VH domain
QLQLQESGPGLVRPSGTLSLTCTVSGGSISSNNHYWGWVRQPPGKGLEWIGTVYYSGSTYYNPSLKSRVTISVDTSKNQFSLNLSSLTAADTAVYHCARQRDTYYHGSQRYFLDYFDYWGQGTPVTVSS

SEQ ID NO: 18304 - protein, 125 aa, Artificial Sequence
  Synthetic polypeptide representing artificial human antibody VH domain
QVQLVESGGGVVQPGRSLRLSCAASGFTFSSFGMHWVRQAPGKGLEWVAVILYDGRNKYYVDSVKGRFTISRDNSKNTLYLQMNSLRAEDTAVYYCAKDRLGYCSSTSCHRLDPWGQGTLVTVSS

SEQ ID NO: 18305 - protein, 130 aa, Artificial Sequence
  Synthetic polypeptide representing artificial human antibody VH domain
QVQLVQSGSELKKPGASVKVSCKASGYTFTSYAMNWVRQAPGQGLEWMGWINTNTGNPTYAQGFTGRFVFSLDTSVSTAYLQISSLKAEDTAVYYCATPLYCSGGSCYRYGEYYYGMDVWGQGTTVTVSS

SEQ ID NO: 18306 - protein, 123 aa, Artificial Sequence
  Synthetic polypeptide representing artificial human antibody VH domain
QVQLVESGGGVVQPGMSLRLSCTASGFAFSDYSMHWVRQAPGKGLEWVAVIWFDGTNRYHADSVEGRFTISRDNSKSTLYLEMNSLRVEDTALYYCGKASPSVDIAAAGIDYWGQGTLVIVSS

SEQ ID NO: 18307 - protein, 121 aa, Artificial Sequence
  Synthetic polypeptide representing artificial human antibody VH domain
QVQLVQSASEVKNPGSSVKVSCKILGDSFSTLRLNWVRQVQGHGLEWLGGIIPIVHITTYAENFQDRVTITADDSTTTLYMEIRGLTSDDTAVYYCATSGYFQDISGDDFWGQGTLVSVSS

SEQ ID NO: 18308 - protein, 127 aa, Artificial Sequence
  Synthetic polypeptide representing artificial human antibody VH domain
QVQLVQSGAEVKKPGASVKVSCKASGYTFTSYGISWVRQAPGQGLEWMGWISAYNGNTNYAQKLQGRVTMTTDTSTSTAYMELRSLRSDDTAVYYCARQVDGDYVGDWDYYYGMDVWGQGTTVTVSS

SEQ ID NO: 18309 - protein, 130 aa, Artificial Sequence
  Synthetic polypeptide representing artificial human antibody VH domain
QLQLQESGPGLVKPSETLSLTCTVSGGSISSSSYYWGWIRQPPGKGLEWIGSIYYSGSTYYNPSLKSRVTISVDTSKNQFSLKLSSVTAADTAVYYCARETYYYGSGSYPQYYYYGMDVWGQGTTVTVSS

SEQ ID NO: 18310 - protein, 129 aa, Artificial Sequence
  Synthetic polypeptide representing artificial human antibody VH domain
QLQLQESGPGLVRPSETLSLTCTVSGGSISSSNHYWGWIRQPPGKGLEWIGTVYYSGSTYYNPSLKSRVTISVDTSNNQFSLDLSSLTAADTAVYHCARQRDTYYHGSQKYFLDFFDYWGQGTPVTVSS

SEQ ID NO: 18311 - protein, 130 aa, Artificial Sequence
  Synthetic polypeptide representing artificial human antibody VH domain
QVKLVQSGAEVKKPGSSVRVSCKASGGDFNNYAISWVRQAPGQGLEWMGGIIPMFGTPNYAQKFQGRVTFIADVSSNTAYMELSSLRSEDTAVYFCARTTYFSDDNGHSRYYYYYYMDVWGKGTTVTVSS

SEQ ID NO: 18312 - protein, 131 aa, Artificial Sequence
  Synthetic polypeptide representing artificial human antibody VH domain
EVQLVESGGGLVKPGGSLRLSCAASGFTFSNAWMSWVRQAPGKGLEWVGRIKSKTDGGTTDYAAPVKGRFTISRDDSKNTLYLQMNSLKTEDTAVYYCTTGRGSGNFFGGEYYYYYGMDVWGQGTTVTVSS

SEQ ID NO: 18313 - protein, 117 aa, Artificial Sequence
  Synthetic polypeptide representing artificial human antibody VH domain
QVQLVESGGGVVQPGRSLRLSCAASGFTFSSYAMHWVRQAPGKGLEWVAVISYDGSNKYYADSVKGRFTISRDNSKNTLYLQMNSLRAEDTAVYYCARWEGGGMDVWGQGTTVTVSS

SEQ ID NO: 18314 - protein, 125 aa, Artificial Sequence
  Synthetic polypeptide representing artificial human antibody VH domain
QVQLVESGGGVVQPGRSLRLSCAASGFTFSSYGMHWVRQAPGKGLEWVAVISYDGSNKYYADSVKGRFTISRDNSKNTLYLQMNSLRAEDTAVYYCAGDYDILTGYYWVYAFDIWGQGTMVTVSS

SEQ ID NO: 18315 - protein, 122 aa, Artificial Sequence
  Synthetic polypeptide representing artificial human antibody VH domain
EVQLVQSGAEVKKPGESLKISCKGSGYSFTSYWIGWVRQMPGKGLEWMGIIYPGDSDTRYSPSFQGQVTISADKSISTAYLQWSSLKASDTAMYYCARHGRGYSYDLPFDPWGQGTLVTVSS

SEQ ID NO: 18316 - protein, 123 aa, Artificial Sequence
  Synthetic polypeptide representing artificial human antibody VH domain
QVQLVESGGGVVQPGRSLRLSCAASGFSFSDYSMHWVRQAPGKGLEWVAVIWYDGSHEYYADSVKGRFTISKDNSKNTLYLQMDSLRVEDTAIYYCGKASPSVDIAAAGIDYWGQGTLVTVSS

SEQ ID NO: 18317 - protein, 125 aa, Artificial Sequence
  Synthetic polypeptide representing artificial human antibody VH domain
EVQLLESGGGLVQPGGSLRLSCAASGFTFSNYAMSWVRLAPGKGLEWVSSIRDSGGSTKYAESVKGRFTVSRDDSKNTLFLEMNSLRGEDTAVYYCAMPPHGYVSNWYTYWFDFWGQGTLVTVSS

SEQ ID NO: 18318 - protein, 129 aa, Artificial Sequence
  Synthetic polypeptide representing artificial human antibody VH domain
EVQLVEAGGGLVQSGGSLRLSCAASGFTFINYWMTWVRQAPGGGLEWVANIDQHGTEMYFVESVKGRFTISRDNAKNLVYLQMNSVRDEDTAVYYCARDGPHYDALTASWTYVGIFDVWGQGTMVTVSS

SEQ ID NO: 18319 - protein, 114 aa, Artificial Sequence
  Synthetic polypeptide representing artificial human antibody VH domain
EVQLVESGGGLVKPGGSLRLSCAASGFTFSSYSMNWVRQAPGKGLEWVSSISSSSSYIYYADSVKGRFTISRDNAKNSLYLQMNSLHQGPIGLPPGTLLQEHLWGQGTTVTVSS

SEQ ID NO: 18320 - protein, 122 aa, Artificial Sequence
  Synthetic polypeptide representing artificial human antibody VH domain
QVQLVQSGAEVKKPGASVKVSCKASGYTFTGYYMHWVRQAPGQGLEWMGWINPNSGGTNYAQKFQGRVTMTRDTSISTAYMELSRLRSDDTAVYYCAREGEMATRNDAFDIWGQGTMVTVSS

SEQ ID NO: 18321 - protein, 125 aa, Artificial Sequence
  Synthetic polypeptide representing artificial human antibody VH domain
QVQLVESGGGVVQPGGSLRLSCAASGFTFNNYGMHWVRQAPGKGLEWVAIISYEGSKKYYINSVKGRFTISRDSSKKTLYLQMNSLRPEDTAVYYCAKRDVIFWLGESQGAFDIWGQGTMVIVSS

SEQ ID NO: 18322 - protein, 126 aa, Artificial Sequence
  Synthetic polypeptide representing artificial human antibody VH domain
EVQLVESGGGLVKPGGSLRLSCAASGFTFSSYSMNWVRQAPGKGLEWVSSISSSSSYIYYADSVKGRFTISRDNAKNSLYLQMNSLRAEDTAVYYCARLYCSSTSCYNYYYYMDVWGKGTTVTVSS

SEQ ID NO: 18323 - protein, 117 aa, Artificial Sequence
  Synthetic polypeptide representing artificial human antibody VH domain
EVQLLESGGGLIQPGGSLRLSCVASGFTFGDYSISWLRQAPGKGLEWVAHIDKDVSRTHYADSVVGRFTVSRDNSKHTVYLQMYTLRPEDTALYYCATWISAHFDNWGQGTPVTVSS

SEQ ID NO: 18324 - protein, 118 aa, Artificial Sequence
  Synthetic polypeptide representing artificial human antibody VH domain
EVHLVESGGGLVQPGGSLRLSCAGSGFTFSAYNIHWVRQAPGQGLVWLSKINDDGSSPIYADSVRGRFTTSRDNSKNVVYLQMNSLRVEDTAVYFCARDRDWEIFDFWGLGTLVTISS

SEQ ID NO: 18325 - protein, 115 aa, Artificial Sequence
  Synthetic polypeptide representing artificial human antibody VH domain
EVQLVESGGGLVQPGGSLRLSCTTSGFLLDSYYMNWVRQSPGKGLDWIAYISGSSKNIYYADSVKGRFIISRDSAKKSVFLQMNSLRAEDTGLYYCVRGLDIDYWGQGTVVTVSS

SEQ ID NO: 18326 - protein, 120 aa, Artificial Sequence
  Synthetic polypeptide representing artificial human antibody VH domain
EVQLLESGGGLVQPGGSLRLSCAASGLTFSTFGMTWVRQAPGKGLEWVSGISSFYSTYYADSLKGRFTISRDNAKNTLYLHMSSLRAEDTAVYYCATKGGENGYYYWTYWGQGTLVTVSS

SEQ ID NO: 18327 - protein, 120 aa, Artificial Sequence
  Synthetic polypeptide representing artificial human antibody VH domain
EVQLVESGGQLVEPGGSLRLSCAASGFNFNTYNMQWVRQAPGKGLEWVAYLSDISTTIYYSDSLEGRFTVSRDNAQNSLFLQMDSLRVEDTAVYFCARSRVGRWELPDYWGQGTLVTVSS

SEQ ID NO: 18328 - protein, 126 aa, Artificial Sequence
  Synthetic polypeptide representing artificial human antibody VH domain
EVQLVESGGGLVKPGGSLRLSCAASGLTFSLAWMTWVRQAPGKGLEWVGRIKSKASGGTIDYAAPVKGRFTISRDDSKYTLYLQMNSLKTEDTAVYYCAHIVSSTVTDPDLYFKTWGQGTLVTVSS

SEQ ID NO: 18329 - protein, 126 aa, Artificial Sequence
  Synthetic polypeptide representing artificial human antibody VH domain
EVQLVESGGGLVQPGRSLRLACVGSGFNFDDHAMHWVRQVPGKGLEWITGISWNSVNVAYGGSVKGRFTVSRDNAKNSLFLEMNSLRPEDTALYYCARDMVAVSDSSVGEGWFDNWGQGTLVTVSS

SEQ ID NO: 18330 - protein, 122 aa, Artificial Sequence
  Synthetic polypeptide representing artificial human antibody VH domain
EVQLLESGGGLVQPGGSLRLSCAASGLTFKKYAISWFRQAPGKGLEWVSSINADGAGTYYAESVKGRFTISRDNSKSTLYLQMNSLRAEDTAVYYCAKDPNGDYPLGSSDYWGPGTLVTVSS

SEQ ID NO: 18331 - protein, 118 aa, Artificial Sequence
  Synthetic polypeptide representing artificial human antibody VH domain
EVQLVESGGGLVQPGGSLTLSCVASGFTFSNYNMHWVRQVPGKGLVWLSKINDDGTGPVYADSVKGRFTTFRDNAKDTVFLQMYSLRAEDTGVYYCARDRAWQIYDYWGPGTLVTVSS

SEQ ID NO: 18332 - protein, 115 aa, Artificial Sequence
  Synthetic polypeptide representing artificial human antibody VH domain
EVQLLESGGDLVEPGGSLRLSCQATGDTFRNFEMNWVRQVPGKGLQWVSSVSASGALTNYADSLRGRFIVSRDNSRNSVSLQMNGLRVDDTAVYYCVTVHDSPSWGQGTLVIVSA

SEQ ID NO: 18333 - protein, 122 aa, Artificial Sequence
  Synthetic polypeptide representing artificial human antibody VH domain
EVQLVESGGGLVKPGGSLRLSCAASGFTLSSYTMNWVRQAPGRGLEWVSSIYTSPVSIYYADSVKGRFTISRDNAKSSLYLQMNSLRAEDTAMYYCARERIYSYSSRSFDCWGQGTLVTVSS

SEQ ID NO: 18334 - protein, 117 aa, Artificial Sequence
  Synthetic polypeptide representing artificial human antibody VH domain
EVHLVESGGGLVQPGGSLRLSCAASGFTFKNFWMTWIRQAPGKGLEWVANIKESGSEKSYVDSLKGRFTISRDNTKNSVYLQMNDLRVEDTAVYYCSAVSWLAFDYWGQGTRVTVSS

SEQ ID NO: 18335 - protein, 128 aa, Artificial Sequence
  Synthetic polypeptide representing artificial human antibody VH domain
EVQLVQSGAEVKKPGESLKISCKGSGYSFTSYWIGWVRQMPGKGLEWMGIIYPDDSDTRYSPSFQGQVTISADKSISTAYLQWSSLKASDTAMYYCARTGLYIVGPTWDYYYYGMDVWGQGTTVTVSS

SEQ ID NO: 18336 - protein, 121 aa, Artificial Sequence
  Synthetic polypeptide representing artificial human antibody VH domain
EVQLVESGGRLVQPGGSLRLSCEASGFIFGTYWMTWVRQAPGKGLEWVANINGDGSEENYVDSVKGRFTIFRDNAKNSLYLQMNSLRVDDTAVYFCARGWCSPHCYGMGVWGQGSTVIVSS

SEQ ID NO: 18337 - protein, 120 aa, Artificial Sequence
  Synthetic polypeptide representing artificial human antibody VH domain
QVQLVQSGAEVKKPGASVKVSCKASGYTFTSYDINWVRQATGQGLEWMGWMNPNSGNTGYAQKFQGRVTMTRNTSISTAYMELSSLRYEDTAVYYCARVRGRYSYGMDVWGQGTTVTVSS

SEQ ID NO: 18338 - protein, 123 aa, Artificial Sequence
  Synthetic polypeptide representing artificial human antibody VH domain
EVQLVDSGGGLVQPGRSLRLSCAASGFTFGDYALTWFRQAPLRGLEWVAFIRAKTFGSTTEYAAFAQGRFSVSRDDSKSIAYLQMNRLKTDDTGVYFCTRGDSDSYYDFSAYWGQGTLVTVSS

SEQ ID NO: 18339 - protein, 129 aa, Artificial Sequence
  Synthetic polypeptide representing artificial human antibody VH domain
QLQLQESGPGLVKPSETLSLTCTVSGGSISSSSYYWGWIRQPPGKGLEWIGSIYYSGSTYYNPSLKSRVTISIDTSKNQFSLKLSSVTAADTAVYYCARDPVASITIFGVVTRYGMDVWGQGTTVTVSS

SEQ ID NO: 18340 - protein, 121 aa, Artificial Sequence
  Synthetic polypeptide representing artificial human antibody VH domain
QLQLHQSGPGLLGPSETLSLICSVSGGSVSDSTYYWGWIRQTPGKGLEWIGSIYYSGSTYYNPSLQSRGTISVDTSRNQFSLRLTSVTAADTAVYFCARQAITWYNYFDMWGQGTLVTVSS

SEQ ID NO: 18341 - protein, 122 aa, Artificial Sequence
  Synthetic polypeptide representing artificial human antibody VH domain
EVQLLESGGGLVQPGGSLRLSCAASGLTFGNYAMHWLRQAPGKGLEWVSGITGSGTATYYAESVKGRFTISRDNSKNTLYLQMNNLRAEDAAVYYCAKDPNGDYVLGSSDSWGQGTLVTVSS

SEQ ID NO: 18342 - protein, 126 aa, Artificial Sequence
  Synthetic polypeptide representing artificial human antibody VH domain
QLQLHESGRGLVKPSETLSLTCNVSGDSISSRSFYWAWIRQPPGKGLEWIGNIFYRGTTYYNASLESRVTMSIDTSKNQFSLKVTSVTAADTAVYFCARQRDYTASSGGGWYFDLWGRGTLVTVSS

SEQ ID NO: 18343 - protein, 131 aa, Artificial Sequence
  Synthetic polypeptide representing artificial human antibody VH domain
QLQLQESGPRLVKPSETLSLTCTVSGGSISSSSYYWAWIRQPPGKGLEWIGSVYYSGSTYYSPSLKSRVSLSVDTSKNQFSLKLSFVTAADTAVYYCATEGTTYDDFWGGQPRLNNWFDPWGQGTLVTVSS

SEQ ID NO: 18344 - protein, 121 aa, Artificial Sequence
  Synthetic polypeptide representing artificial human antibody VH domain
QVQLVESGGGVVQPGRSLRLSCAASGFTFSTYAMHWVRQAPGKGLEWVAVISYDGSNKYYPDSVKGRFTISRDNSKNTLYLQMNSLRAEDTAVYYCARGLRGNYYYGMDVWGQGATVTVSS

SEQ ID NO: 18345 - protein, 125 aa, Artificial Sequence
  Synthetic polypeptide representing artificial human antibody VH domain
EVQLVESGGDLVKPGGSLKLSCAASGFSFSNAWMSWVRQAPGKGLEWVARIKRKSDGGTSDYPSVVEGRFTISRDDSKNTLYLQMNNLRNEDTGVYYCVTGQPRISGWWGAYDMWGPGTMVTVSS

SEQ ID NO: 18346 - protein, 115 aa, Artificial Sequence
  Synthetic polypeptide representing artificial human antibody VH domain
EVQLLESGGGLVQPGGSLRLSCAASGFTFSSYAMNWVRQAPGKGLEWVSTLSGSAISTYYADSVKGRFTISRDNSKNTLSLQMNSLRAEDTAVYFCAKSMDLDYWGPGTLVTVSS

SEQ ID NO: 18347 - protein, 123 aa, Artificial Sequence
  Synthetic polypeptide representing artificial human antibody VH domain
QVQLVQSGAEVKKPGASVKVSCKASGFTFTDYFLHWVRQAPGQGLEWMGRINPNTGATNYAQKFLGRVTVTRNTSINTAYMEVRRLRSDDTVVYFCARGRPPFFTSPDVFDLWGQGTVVTVSS

SEQ ID NO: 18348 - protein, 119 aa, Artificial Sequence
  Synthetic polypeptide representing artificial human antibody VH domain
QITLKESGPTLVKPTQTLTLTCTFSGFSLTTSGVGVGWIRQPPGKALEWLALIYWDDDKRYSPSLKSRLTITKDTSKNQVVLTVTNMDPVDTATYYCAHHTITTVFDYWGQGTLVTVSS

SEQ ID NO: 18349 - protein, 127 aa, Artificial Sequence
  Synthetic polypeptide representing artificial human antibody VH domain
EVQLLESGGGRVQPGGSLRLSCVTSGFSFSSYGMSWVRQAPGKGLEWVSGISGSGGSTYHVESVKGRFTISRDNSRNTLNLQMESLRVEDTAVYFCAKRAEDGRYGKFGYHGAWGSWGQGTLVTVSS

SEQ ID NO: 18350 - protein, 122 aa, Artificial Sequence
  Synthetic polypeptide representing artificial human antibody VH domain
EVQLVESGGGLVKPGGSLRLSCEASGFTLSSYSMNWVRRAPGRGLEWVASIFTSGVSVYYADSVKGRFTISRDNAKNSLSLQMNSLRAEDTAVYYCARDRRLTYSSRYFDYWGRGTLVTVSS

SEQ ID NO: 18351 - protein, 122 aa, Artificial Sequence
  Synthetic polypeptide representing artificial human antibody VH domain
EVQLLESGGGLVQPGGSLRLSCAASGLTISTYAMTWFRQAPGKGLDWVSSITGNGDGTYYADSVKGRFTISRDNSKNTLYLQMNNLRADDTAVYYCGKDPNGNYVLGSSDYWGQGTLVTVSS

SEQ ID NO: 18352 - protein, 117 aa, Artificial Sequence
  Synthetic polypeptide representing artificial human antibody VH domain
EVQLVESGGGLVQPGGSLRLSCAASGFIFRHYAMNWVRQAPGKGLEWISHIYSATDSIYYADSVKGRLTISRDNAKDTLYLQMDSLRDEDTAVYYCARDLDWAFDYWGQGTLVTVSS

SEQ ID NO: 18353 - protein, 123 aa, Artificial Sequence
  Synthetic polypeptide representing artificial human antibody VH domain
EVNVLESGGGLVLPGGSLRLSCSASGFTFNSFAINWVRQAPGKGLEWVAGISGGRGTTYYADSVRGRFIISRDNSKRVVYLQMNSLTADDAAVYHCAKDSGGDPRMAYWFDPWGQGTLVTVSS

SEQ ID NO: 18354 - protein, 120 aa, Artificial Sequence
  Synthetic polypeptide representing artificial human antibody VH domain
QVQLVESGGGLVKPGGSLRLSCAASGFPFSDYYMSWIRQPPGKGLEWISYISSRSRSTFYADSVKGRFTISRDNANNSLFLHMNSLRAEDTALYYCARGVVGAEDAFDLWGQGTMVTVSS

SEQ ID NO: 18355 - protein, 121 aa, Artificial Sequence
  Synthetic polypeptide representing artificial human antibody VH domain
EVQLVESGGGLVKPGGSLRLSCAASGFSFSNYAMNWVRQAPGEGLEWVSSISRSSSYIFYADSVKGRFTISRDNANNLLYLQINSVRAEDTAVYYCARQYSSSSGRHFDYWGQGTLVTVSS

SEQ ID NO: 18356 - protein, 129 aa, Artificial Sequence
  Synthetic polypeptide representing artificial human antibody VH domain
EVHLLESGGGLVQPGGSLRLSCITSGFTFRSHAMSWVRQAPGKGLQWVSAISGNGFTTLYADSVKGRFTISRDNSNDTLYLQIHSLRADDTAVYYCAKDAFYFGYCSGGVCPNDALDVWGQGTTVTVSS

SEQ ID NO: 18357 - protein, 118 aa, Artificial Sequence
  Synthetic polypeptide representing artificial human antibody VH domain
QVQLVQSGAEVKKPGASVRVSCKASGYTFSSYAIHWVRQAPGQGLEWMGWINVDNGNTKYSQKFQGRVTFKRDTSASTVYMDLSSLRSEDTAVFYCARGSGLRGIDPWGQGTLVTVSS

SEQ ID NO: 18358 - protein, 119 aa, Artificial Sequence
  Synthetic polypeptide representing artificial human antibody VH domain
QVQLQESGPGLVKPSETLSLTCTVSGGSMSYSYWTWIRQPPGKGLEFIGYISKTGRTNYNPSLKSRVTISGDTSKNHFSLKLTSVSAADTAVYYCARESGYSYGVFDYWGQGTLVTVSS

SEQ ID NO: 18359 - protein, 123 aa, Artificial Sequence
  Synthetic polypeptide representing artificial human antibody VH domain
EVQLLESGGGLIQPGGSLRLSCAASGFTFQTYPMSWVRQAPGKGLEWVSSISGSGGRTYYADSVKGRFTVSRDKDNNMLYMEMDSLRDDDTATYYCAKDYMAHTSRPWAFDVWGRGTLVTVSS

SEQ ID NO: 18360 - protein, 121 aa, Artificial Sequence
  Synthetic polypeptide representing artificial human antibody VH domain
EVQLVESGGGLVQPGGSRKLSCVVSGFTFSGAAMHWVRQPPGKGLEYVSAITTTGRTTLYADSVKGRFTVSRDNSKNTLYLQMGSLRPEDTAVYYCARDFPGGGWSYFDYWGQGTLVAVSS

SEQ ID NO: 18361 - protein, 121 aa, Artificial Sequence
  Synthetic polypeptide representing artificial human antibody VH domain
EVQLVESGGGLVQPGGSLRLSCATSGFTFSDYFMDWVRQAPGKGLEWLGRTRNKFSSDTTYYAASVKGRFTISADDSKSSLYLQMNSLKIEDTAVYYCARGGPIDGYNPYWGQGTLVTVSS

SEQ ID NO: 18362 - protein, 129 aa, Artificial Sequence
  Synthetic polypeptide representing artificial human antibody VH domain
EVQLVESGGGLVQPGGSLRLSCAASGFTFSSYSMNWVRQAPGKGLEWVSYISSSSSTIYYADSVKGRFTISRDNAKNSLYLQMNSLRAEDTAVYYCARKYTIAAAGILLPSYYYVMDVWGQGTTVTVSS

SEQ ID NO: 18363 - protein, 118 aa, Artificial Sequence
  Synthetic polypeptide representing artificial human antibody VH domain
QVRLQESGPGLVKPSETLSLTCFVSGDSIISWTHYYSWIRQPPGRGLEWIGEVHHTGATKYNPSLRSRVTVSVDTSKSQFSLSLTSVTAADTAVYYCARGSGFTWNIGDQGILVTVSS

SEQ ID NO: 18364 - protein, 121 aa, Artificial Sequence
  Synthetic polypeptide representing artificial human antibody VH domain
EVQLVESGGGSVKPGGSLRLSCAASGFVFKTAWMDWVRQAPGKGLEWIAQIKSERDGATADYPAAVRGRFIISRDDSKNTLYLEMNSLKTDDTAMYYCTTGVSAAAHDGYWGQGTLVSVSS

SEQ ID NO: 18365 - protein, 130 aa, Artificial Sequence
  Synthetic polypeptide representing artificial human antibody VH domain
QVQLVQSGAEVKKPGSSVKVSCKASGGTFTSYAINWVRQAPGQGPEWMGAIIPALGTTDYAQKFQGRVTMTADESTGTAYMDLSSLRSEDTAVYYCARPGYCSGGSCYIGYYTYYGLDVWGQGTTLTVSS

SEQ ID NO: 18366 - protein, 121 aa, Artificial Sequence
  Synthetic polypeptide representing artificial human antibody VH domain
QVQLKVRGAGLLKPSDTLSLTCEIDGASIGDYLWTWIRQAPGKGLEWVGQINRRSEFNSNPTLKSRVAFSVGSSATHVSMTLESVTAADTGLYFCARGVVSGVVLHYLDLWAQGVLVTVSA

SEQ ID NO: 18367 - protein, 129 aa, Artificial Sequence
  Synthetic polypeptide representing artificial human antibody VH domain
EVQLVQSGAEVKKSGESLKISCQGSGYSFSNYHIVWVRQMPGKGLEWMGIIYPGDSKTAYSPSFQGQVTISVDKSINTAYLQWSGLKASDTAMYYCARRAYCGGSCTRNHYQYFGMDVWGQGTKVTVSS

SEQ ID NO: 18368 - protein, 127 aa, Artificial Sequence
  Synthetic polypeptide representing artificial human antibody VH domain
QVQLVESGGGVVQPGGSLRLSCAASGFTFSRYGMYWVRQAPGKGLEWVGGIWYDGSEKYYADSVRGRCTISRDNLKNTLYLQVNNLRTEDTAIYYCARDPRLDDYWSGYIPGYSDSWGQGTLVTVSS

SEQ ID NO: 18369 - protein, 129 aa, Artificial Sequence
  Synthetic polypeptide representing artificial human antibody VH domain
QLQLQESGPGLVKPSETLSLTCTVSGGSISSSSYYWGWIRQPPGKGLEWIGSIYYSGSTYYNPSLKSRVTISVDTSKNQFSLKLSSVTAADTAVYYCARTTIAKITIFGVVPRYYFDYWGQGTLVTVSS

SEQ ID NO: 18370 - protein, 119 aa, Artificial Sequence
  Synthetic polypeptide representing artificial human antibody VH domain
EVQLVESGGGLVQPGGSLRLSCAASGFTFSNYWMSWVRQAPGKGLEWVANIKQDGSEKYYVDPVKGRFTIFRDNAKNSLLLQMSSLRVEDTAVYYCARDGGRSTDFEYWGQGTLVTVSS

SEQ ID NO: 18371 - protein, 119 aa, Artificial Sequence
  Synthetic polypeptide representing artificial human antibody VH domain
EVQLVESGGGLVQPGRSLRLSCVASGFEFDAYAMHWVRQRPGKGLEWVSGISWNSGTIGYVDSVKGRFTISRDNAKNSLYLQMNSLRPEDTAFYHCVKDNSGWYYFDSWGPGTRVTVSS

SEQ ID NO: 18372 - protein, 129 aa, Artificial Sequence
  Synthetic polypeptide representing artificial human antibody VH domain
EVHLLESGGGLVRPGDSLKLSCIASGFTFRSHAMSWVRQAPGQGLQWVSAISGSGLTTFYADSVQGRFTISRDNSNNTLFLQIHSLRADDTAVYYCAKDSFFFGYCRNGVCPNDAFDVWGQGTVVTVSS

SEQ ID NO: 18373 - protein, 119 aa, Artificial Sequence
  Synthetic polypeptide representing artificial human antibody VH domain
EVQLVESGGALVQPGGSLRLSCVASGYTFGAHYMDWVRQAPGKGLEWVSRTTNQIDTYTTQYAASVKGRFTVSRDHATNSLYLQMNSLKVEDTAVYYCGRDTAASVDVWGQGTTVTVSS

SEQ ID NO: 18374 - protein, 126 aa, Artificial Sequence
  Synthetic polypeptide representing artificial human antibody VH domain
QVRLQQWGAGLLRPSETLSLTCAVYAEAFNGYYWSWIRQSPGKGLEWIGEISHPGRAKYNPSLKSRLTISVDTYRKQFSLKLSSVTAADTAVYYCARGPYRRILVVVSPMYYFDYWGRGTLVTVSS

SEQ ID NO: 18375 - protein, 129 aa, Artificial Sequence
  Synthetic polypeptide representing artificial human antibody VH domain
EVQLVESGGGLVQPGGSLRLSCVASGFTFSNHYMDWVRQAPQKGLEWVGRIRHKVHSYTTEYAASVKGRFTISRDDSKNSVYLQLNSLKTEDTAVYYCVRHVSHYYEGRGWHGHAFDSWGQGTVVTVSS

SEQ ID NO: 18376 - protein, 124 aa, Artificial Sequence
  Synthetic polypeptide representing artificial human antibody VH domain
QVQLVQSGSELKKPGASVKVSCKSSGYTFTNYAMYWVRQAPGQGLEWVGRINTNTGKSTFAPGFTGRFVLSLDKYVSTTYIEITALRAEDTAMYYCARDAFEWELPARGPADYWGQGTLITVSS

SEQ ID NO: 18377 - protein, 121 aa, Artificial Sequence
  Synthetic polypeptide representing artificial human antibody VH domain
QVQLVESGGGVVQPGRSLRLSCAASGFTFSSYAMHWVRQAPGKGLEWVAVISYDGSNKYYADSVKGRFTISRDNSKNTLYLQMNSLRAEDTAVYYCARGVHGGWYSLFDYWGQGTLVTVSS

SEQ ID NO: 18378 - protein, 123 aa, Artificial Sequence
  Synthetic polypeptide representing artificial human antibody VH domain
EVQLVQSGVEVKKPGESLKISCKASGYNFNTYWIGWVRQVPGKGLESMGIIYPHKSDTRYSPSFQGQVSISADKSISTAYLQWSSLQASDTAIYYCARRADCSTTTCQHYDFWGQGTLVTVSS

SEQ ID NO: 18379 - protein, 119 aa, Artificial Sequence
  Synthetic polypeptide representing artificial human antibody VH domain
QVQLVQSGAEVKEPGASVKLSCKASGYSFSTYYIHWVRQAPGQGLQWMGRIYPKGGSTSYSQRFQDRVTMSRDTSTNTVYMEMRSLRSEDTATYFCARSIAATGRADYWGQGSQVTVSS

SEQ ID NO: 18380 - protein, 120 aa, Artificial Sequence
  Synthetic polypeptide representing artificial human antibody VH domain
EVQLVESGGGLVQPGGSLRLSCAASGFTFSTYWMHWVRQAPGKGLVWVSRIDSDGSTTTYADSVKGRFTISRDNAKNTLFLQMNNLRAEDTAVYYCARGYIGAPGHGDYWGLGTLVTVSS

SEQ ID NO: 18381 - protein, 117 aa, Artificial Sequence
  Synthetic polypeptide representing artificial human antibody VH domain
QVQLVESGGGVVQPGRSLRLSCAASGFTFSSYGMHWVRQAPGKGLEWVAVIWYDGSNKYYADSVKGRFTISRDNSKNTLYLQMNSLRAEDTAVYYCAKDFRDAFDIWGQGTMVTVSS

SEQ ID NO: 18382 - protein, 120 aa, Artificial Sequence
  Synthetic polypeptide representing artificial human antibody VH domain
EVQLLQSGGGLVQPGGSLRLSCEASGFTFASYAMTWVRQAPGKGLEWVSAISYTGTITYYADSVRGRFSISRDNSKNTLHLQMDSLRADDTAVYYCAKCGGSFAWPFEYWGQGTLVIASS

SEQ ID NO: 18383 - protein, 125 aa, Artificial Sequence
  Synthetic polypeptide representing artificial human antibody VH domain
QVQLQESGPGLVKPSQTLSLTCTVSGGSISSGGYYWSWIRQHPGKGLEWIGYIYYSGSTYYNPSLKSRVTISVDTSKNQFSLKLSSVTAADTAVYYCARAGRITIFGVVNHFDYWGQGTLVTVSS

SEQ ID NO: 18384 - protein, 129 aa, Artificial Sequence
  Synthetic polypeptide representing artificial human antibody VH domain
EVYLLESGGGLVQPGGSLRLSCTASGFSFRNHAMSWVRQAPGTGLQFLSSISASGFNTFYADSVKGRFTISRDNSNNTLYLQIFNLRDDDTAVYYCAKDAVHFGYCPNGICPNDAFDIWGQGTMVTVSS

SEQ ID NO: 18385 - protein, 127 aa, Artificial Sequence
  Synthetic polypeptide representing artificial human antibody VH domain
QVQLQESGPGLVKPSETLSLTCTVSGGSVSSDNYYWSWIRQPPGKGLEWIGYMYYSGSTNYNPSLKSRVTISVVTSKNQFSLKLSSVTAADTALYYCARLLFFGSRKTAPTHAFDIWGQGTMVTVSS

SEQ ID NO: 18386 - protein, 118 aa, Artificial Sequence
  Synthetic polypeptide representing artificial human antibody VH domain
EVQLVESGGGLVQPGGSLRLSCAVSGFSVSDLYMTWVRQAPGKGLEWVSLMYNTGRTQYADSVKGRFTISGDSSKNMVYLQMNNLRAEDTAVYYCAGDTASPSRSDFWGQGTLVTVSS

SEQ ID NO: 18387 - protein, 121 aa, Artificial Sequence
  Synthetic polypeptide representing artificial human antibody VH domain
EVELVQSGAELKKPGESLTISCKASGYSIRSFWITWVRQMPGKGLEWMGRINPSDSYINYSPSFEGHVTISVDKSINTAYLQWRSLKASDTAIYYCARRWGYYETSGYYYWGQGTLVTVSS

SEQ ID NO: 18388 - protein, 125 aa, Artificial Sequence
  Synthetic polypeptide representing artificial human antibody VH domain
EVEVVESGGGLVQPGGSLKLSCAASGFTFSASEIHWVRQASERGLEWVGRVRMKAFNYATVYGASMEGRFSISRDDSKNTAYLHLNSLRTDDTAVYYCSISYGGPGLPAGGLGYWGQGALVIVSS

SEQ ID NO: 18389 - protein, 128 aa, Artificial Sequence
  Synthetic polypeptide representing artificial human antibody VH domain
QVLLQESGPGLLKPSETLSLTCSVSGDDSMKSYYWSWIRQPPGRRLEWIGYVFHGGIANSHPSLKSRVAMSVDTSKRQFSLKLTSMTAADTAVYYCARVFKLSFSEWPQIFDFGFDYWGQGILVTVSS

SEQ ID NO: 18390 - protein, 115 aa, Artificial Sequence
  Synthetic polypeptide representing artificial human antibody VH domain
EVQLVESGGGLVQPGGSLRLSCTTSGFLLSSYYMNWVRQSPGKGLEWISYISGSGKNIYYADSVKGRFTIYRDSAKKSVYLQMNSLRAEDTGLYYCVRGLDIDYWGQGTVVTVSS

SEQ ID NO: 18391 - protein, 119 aa, Artificial Sequence
  Synthetic polypeptide representing artificial human antibody VH domain
QVQLLESGGGVVQPGGSLRLSCAASGFSFNNYVVHWVRQPPGKGLEWVSVISYEGRNKYYTGSVKGRFTISRDNSNNTVHLQMDSLTLHDTAVYFCVRGETFWSGLDYWGQGTLVTVSS

SEQ ID NO: 18392 - protein, 119 aa, Artificial Sequence
  Synthetic polypeptide representing artificial human antibody VH domain
QMHLVQSGPEVKKPGASVKVSCEASGFTFSNSVVHWVRQARGQRLEWMGWIVVGSGNTDYAQKFQDRVTITRDLSTKTAHMELTSLRSEDTALYYCVAGMLVETTFDYWGRGTLVTVSS

SEQ ID NO: 18393 - protein, 123 aa, Artificial Sequence
  Synthetic polypeptide representing artificial human antibody VH domain
EVQLLESGGGLVQPGGSLRLSCAASGFTFSNYAMSWVRQAPGKGLEWVSGLIENGVDRYYADSVRGRFTISRDNSRNTLYLQMNSLKVEDTALYYCVKDYTVKTLAEPMFEFWGQGTLVTVSS

SEQ ID NO: 18394 - protein, 119 aa, Artificial Sequence
  Synthetic polypeptide representing artificial human antibody VH domain
EVQLVESGGGMLQPGRSLRLSCAASGFQFEAFAMHWVRQAPGKGLEWVSGISWNSGTKGYADSVRGRFTISRDNAKNFLYLDIETLRPEDTAFYYCVKDNSGWYYFDNWGQGTLVTVSS

SEQ ID NO: 18395 - protein, 121 aa, Artificial Sequence
  Synthetic polypeptide representing artificial human antibody VH domain
EVLLVESGGGLVQPGRSLRLSCGASGFSFHDYAMHWVRQRPGKGLEWVSGIRWNNGPIGYVDSVKGRFVVSRDNAENSLYLEMNSLKVEDTAIYFCAKAFYSGAGVGMDVWGQGIAVIVSS

SEQ ID NO: 18396 - protein, 122 aa, Artificial Sequence
  Synthetic polypeptide representing artificial human antibody VH domain
EVQLLESGGGLVQPGGSLRLSCAASGLTFRNYAMSWFRQAPGKGLEWVSSITGDGIGTYYAESVKGRVTISRDNSRTTLYLQMNSLRADDTAVYYCGKDPNGDYVLGSSDYWGQGTLVTVSS

SEQ ID NO: 18397 - protein, 128 aa, Artificial Sequence
  Synthetic polypeptide representing artificial human antibody VH domain
QVQLQQWGAGLLKPSETLSLTCAVYGGSFSGYYWSWIRQPPGKGLEWIGEINHSGSTNYNPSLKSRVTISVDTSKNQFSLKLSSVTAADTAVYYCARGVRRAAAGFLLPVYYYGMDVWGQGTTVTVSS

SEQ ID NO: 18398 - protein, 124 aa, Artificial Sequence
  Synthetic polypeptide representing artificial human antibody VH domain
EVQLVESGGGLVQPGGSLRLSCAASGFTFKSNDMSWVRQAPGKGLEWVSYISGSGTTIYYADSVKGRFTISRDNAKDSLYLQMNSLRADDTAVYYCATVFGSSGWVWRYYFDYWGQGTLVTVSS

SEQ ID NO: 18399 - protein, 127 aa, Artificial Sequence
  Synthetic polypeptide representing artificial human antibody VH domain
QVQVVQSGGEVKKPGASVKVSCKASGYTFISYGISWVRQAPGQGLEWMGWISIYNGNTNYAQKFQGRVTMTTDTSTTTAYMELRGLRSDDTATYYCSTSDPSRNFDWFSYDFGMHVWGQGTTVTVSS

SEQ ID NO: 18400 - protein, 126 aa, Artificial Sequence
  Synthetic polypeptide representing artificial human antibody VH domain
QVQLQESGPGLVKPSETLSLTCTVSGGSISSYYWSWIRQPPGKGLEWIGYIYYSGSTNYNPSLKSRVTISVDTSKNQFSLKLSSVTAADTAVYYCARAGDYYDILTGYYKAYFDYWGQGTLVTVSS

SEQ ID NO: 18401 - protein, 117 aa, Artificial Sequence
  Synthetic polypeptide representing artificial human antibody VH domain
EVQLLESGGGLVQPGGSLRLSCAASGFTFRNFAMIWVRRAPGKGLEWVSTIDGPTTNTHYADSVKGRFTISRDNSKNTVYLQMDTLRAEDTAVYYCSTWLVSHFDYWGQGTLVTVPS

SEQ ID NO: 18402 - protein, 119 aa, Artificial Sequence
  Synthetic polypeptide representing artificial human antibody VH domain
EVQLVESGGGLVKTGGSLRLSCAASGFTFSGFSMIWVRQAPGKGLEWVSFITSNSKYIYYGDSVKGRFTISRDNAKNSLFLQMNSLRVEDTAVYYCVRVFQKQSLPAFWGQGALVTVSS

SEQ ID NO: 18403 - protein, 123 aa, Artificial Sequence
  Synthetic polypeptide representing artificial human antibody VH domain
QVQLVESGGGVVRPGASLRLSCAASGFLFKVYSMNWVRQAPGKGLEWVAGISYAGSGGSDEYYANSVKGRFSISRNDAKSTVTLQMDSLRVEDSGLYYCVRDRGSTWWFFDSWGQGSLVTVSS

SEQ ID NO: 18404 - protein, 126 aa, Artificial Sequence
  Synthetic polypeptide representing artificial human antibody VH domain
EVQLVESGGGLVQPGGSLRLSCAASGFTFSSYEMNWVRQAPGKGLEWVSYISSSGSTIYYADSVKGRFTISRDNAKNSLYLQMNSLRAEDTAVYYCARDFSYVALVVIRHYGMDVWGQGTTVTVSS

SEQ ID NO: 18405 - protein, 126 aa, Artificial Sequence
  Synthetic polypeptide representing artificial human antibody VH domain
EVQLLESGGGSVEPGGSLRLSCAGSGFTFNNYAMSWVRQAPGKGLEWVSIIYSGGGGTYYADSVKGRFTVSRDDSKSTVYLQMNSLTAEDSAVYYCASDDRTTYSENSGHSNFDYWGLGTLATVSS

SEQ ID NO: 18406 - protein, 121 aa, Artificial Sequence
  Synthetic polypeptide representing artificial human antibody VH domain
EVHLVESGGGLVQPGGSLRLSCVGSGFTFNIYEMNWVRQAPGKGPEWVSYINSGADKIYYADSVKGRFTISRDNARNSLYLQMDSLRVEDTAVYYCASRPPQSEVIVFDYWGPGILVTVSS

SEQ ID NO: 18407 - protein, 122 aa, Artificial Sequence
  Synthetic polypeptide representing artificial human antibody VH domain
QVHLVESGGGVVQPGGSLRLSCAVSEFTFGNSVIHWVRQAPGKGLEWVAAMSHDGFSKYYADSVKGRFTISRDSSAKTVNVQMNRLTAEDTAMYYCAREGGTSGKCGYFDYWGQGTLVTVSS

SEQ ID NO: 18408 - protein, 122 aa, Artificial Sequence
  Synthetic polypeptide representing artificial human antibody VH domain
QVQLQQWGAGLLKPSETLSLTCAVYGGSFSGYHWSWIRQSPGKGLEWIGDINHSGSTTYNPSLKSRVTISLDTSKNQFSLNLGSLTAADTAVYYCTRGPFSSVTEFAWFDPWGQGTQVTVSS

SEQ ID NO: 18409 - protein, 121 aa, Artificial Sequence
  Synthetic polypeptide representing artificial human antibody VH domain
QVQLEQSRSKLQRPPGSSVTVSCQATGFILRRLGVTWVRQAPGQGLEWMGWAGFSNDDRKYGENFMGRIRMTLDVSANIAYLEINSLRSDDTALYFCASSMIPPHTRMDVWGQGTTVIVSS

SEQ ID NO: 18410 - protein, 126 aa, Artificial Sequence
  Synthetic polypeptide representing artificial human antibody VH domain
EVQLLESGGGLVQPGGSLRLSCAASGLTFASYAMSWARQGPGKGLEWVSIIYSSDGSTYYADSVQGRFTISRDNSKNTLYLQMNSLRAEDTAVYFCASDDRTNYFVNSGYSNFDYWGQGTLVTVSS

SEQ ID NO: 18411 - protein, 120 aa, Artificial Sequence
  Synthetic polypeptide representing artificial human antibody VH domain
EVQLVESGGGLVKPGGSLRLSCAASGFTFSNYNMNWVRQAPGKGLEWVSSISSSSSYIYYADSVKGRFTISRDNAKNSLYLQMNSLRAEDTAVYYCARGRDSSGYYYCYWGQGTLVTVSS

SEQ ID NO: 18412 - protein, 126 aa, Artificial Sequence
  Synthetic polypeptide representing artificial human antibody VH domain
QVQLVESGGGVVQPGRSLRLSCTASGFTFNTYGMHWVRQTPGKGLEWVGVIFYDGTDGFYGDSVKGRFTISRDNSKNTLYLQMNNLRLEDTAVYYCAKDSSPTRGGVIVPTPFDSWGQGTLVTVSS

SEQ ID NO: 18413 - protein, 122 aa, Artificial Sequence
  Synthetic polypeptide representing artificial human antibody VH domain
EVQLVESGGGFVQTGGSLRLSCAASGFTFKSYEMNWVRQAPGKGLEWVSYVSSNGDTIYYADSVKGRFTVSRDNAKNSLYLQMNSLRAEDTAVYYCARDYKFADFFYGMDVWGQGTTVTVSS

SEQ ID NO: 18414 - protein, 124 aa, Artificial Sequence
  Synthetic polypeptide representing artificial human antibody VH domain
QVQLVQSGAEVKKPGASVKVSCKASGYTFSIYYMHWVRQAPGQGLEWMGIINPGDGRTTYAQKFQGRVTLTRDTSTSTVYMELSSLRSGDTAVYYCARGPRANFRGVMFAFDIWGQGTKVTVSS

SEQ ID NO: 18415 - protein, 133 aa, Artificial Sequence
  Synthetic polypeptide representing artificial human antibody VH domain
EVQLVESGGGLVKPGGSLRLSCAASGFTFRGYAMNWVRQAPGKGLEWVSSISASSTYVYYADSVKGRFTISRDNAKNSLYLQMNSLRAEDTAVYKCARGGPIGSESYHMKSNGGLYYYNVDVWGQGTTVTVSS

SEQ ID NO: 18416 - protein, 125 aa, Artificial Sequence
  Synthetic polypeptide representing artificial human antibody VH domain
EVQLLQSGGGFVQPGGSLRLSCAASGFTFNDHAIHWVRQIPGKGLEWVSTVSPSGVTKFYAASVEGRFTISRDNSKNTVSLQINILRVEDTAIYYCAREFRTGGPWVRQLALDHWGQGTLVNASS

SEQ ID NO: 18417 - protein, 126 aa, Artificial Sequence
  Synthetic polypeptide representing artificial human antibody VH domain
EVQLLESGGGSVEPGGSLRLSCAGSGFTFNNYAMSWVRQAPGKGLEWVSIIYSGGGGTYYADSVKGRFTVSRDDSKSTVYLQMNSLTAEDSAVYYCASDDRTTYSEHSGHSNFDYWGQGTLATVSS

SEQ ID NO: 18418 - protein, 116 aa, Artificial Sequence
  Synthetic polypeptide representing artificial human antibody VH domain
EVQLVESGGGLVKPGGSLRLSCATSGFSFSNSWMNWVRQAPGKGLEWVGRVKRRTDGGTIDYAAFAKGRFTISRDDSESTLYLQMSGLKIEDTAVYYCATRELLLWGQGTLVSVSS

SEQ ID NO: 18419 - protein, 121 aa, Artificial Sequence
  Synthetic polypeptide representing artificial human antibody VH domain
QVQLVQSGGGVVKPGGSLRLSCAASGFIFSDYYMSWIRQAPGKGLEWVSLISSSGSIISYADSVKGRFTISRDNAKNSLYLQMNSLRAEDTAVYYCARDRHIVVVTGVDSWGQGTLVTVSS

SEQ ID NO: 18420 - protein, 126 aa, Artificial Sequence
  Synthetic polypeptide representing artificial human antibody VH domain
EVQLLESGGGLVQPGGSLRLSCAASEFTFSNYVMSWVRQAPGKGLEWVSILYSDDSSTYYADSVRGRFTISSDSFLNTLYLQMDSLRAEDTAVYFCASDDRTNYFDNSGYSNFDYWGQGTLVTVSS

SEQ ID NO: 18421 - protein, 126 aa, Artificial Sequence
  Synthetic polypeptide representing artificial human antibody VH domain
EVQLLESGGGLVQPGGSLRLSCAASGLTFSSYAMSWVRQAPGKGLEWVSIIYSGDSSTYYADSVQGRFTISRDNSKNTLYLQMNSLRAEDTAVYFCASDDRTNYYDNSGYSNFDYWGQGTLVTVSS

SEQ ID NO: 18422 - protein, 128 aa, Artificial Sequence
  Synthetic polypeptide representing artificial human antibody VH domain
QVTLRESGPALVKPTQTLTLTCTFSGFSLSTRGMSVTWIRQPPGKALEWLARIDWDDDKYYSTSLKTRLTISKDTSKNLVVLTMTNMDPVDTATYYCARLVGTCTTVSCFRRGWFDSWGQGTPVTVSS

SEQ ID NO: 18423 - protein, 120 aa, Artificial Sequence
  Synthetic polypeptide representing artificial human antibody VH domain
QVHLVQSGSELKRPGGSVKISCKASGYTFKNYIMNWVRQVPGQGLEWMGWTSSYTGNPTYAQGFTGRFVFSLDTSDSTAYLQIFSLKADDTAVYFCAKAGDASSSHFDLWGQGTLVTVSS

SEQ ID NO: 18424 - protein, 127 aa, Artificial Sequence
  Synthetic polypeptide representing artificial human antibody VH domain
QVQLQESGPGLVKPSETLSLTCTVSGGSFNSYYWSWIRQPPGKGLEWIGDFYNSGSTNYNPSLKSRVTISGDTSKNQFSLKLTSVTAADTAIYYCATAPYSGPYYAGGWGPYYFDSWGQGTLVTVSS

SEQ ID NO: 18425 - protein, 125 aa, Artificial Sequence
  Synthetic polypeptide representing artificial human antibody VH domain
EVQLLESGGELVQTGQSLRLSCAASGFNFNLYAMSWVRQAPGKGLEWVSGISGSGYTSYHADSVMGRFTISRDNSKNTLYLQMNSLRDDDTAVYYCAKDRGLTGRYYWWYYFDSWGQGTQVTVSS

SEQ ID NO: 18426 - protein, 121 aa, Artificial Sequence
  Synthetic polypeptide representing artificial human antibody VH domain
QVQLVESGGGVVQPGRSLRLSCTVSGFPFGNIITHWVRQAPGKGLEWVSAISHDDSKYYIDSVKGRFTISRDNSRNTVNLQMDSLRPEDTAVYYCAREGESSGRAGIFDVWGQGTGVTVSS

SEQ ID NO: 18427 - protein, 123 aa, Artificial Sequence
  Synthetic polypeptide representing artificial human antibody VH domain
QVQLVESGGGVVQPGRSLRLSCAASGFTFSSYAMHWVRQAPGKGLEWVAVISYDGSNKYYADSVKGRFTISRDNSKNTLYLQMNSLRAEDTAVYYCARDLASWFGELPSFGIWGQGTMVTVSS

SEQ ID NO: 18428 - protein, 123 aa, Artificial Sequence
  Synthetic polypeptide representing artificial human antibody VH domain
QMQLAQSGSEVKKPGSSVKISCTASGWTFTYPYLHWVRQAPGQALEWMGWITPYNGNTNYAQTFQGRVTITRAASLQTTYLEVRSLTFEDTAMYYCARSNLDASVSTESFDSWGQGTLVTVSS

SEQ ID NO: 18429 - protein, 119 aa, Artificial Sequence
  Synthetic polypeptide representing artificial human antibody VH domain
QVHLQESGPGLVKPSETLSLTCTVSGGSLSSYYWSWIRQPPGKGLEWVGYIYYSGSTNYNPSLESRVTISVDTSKNHFSLKLNSVTAADTAVYYCARQSRGLAAAADYWGQGTLVTVSS

SEQ ID NO: 18430 - protein, 124 aa, Artificial Sequence
  Synthetic polypeptide representing artificial human antibody VH domain
EVLLVESGGGLVQPGGSLRLSCAVSGFTLSDHYMDWVRQAPGKGLEWVGRSRNKGRSYTTEYAASVEGRFSISRDDSDNSLYLQMNSLKSEDTAVYYCGSARVESGGHYFLDYWGQGALVTVSS

SEQ ID NO: 18431 - protein, 122 aa, Artificial Sequence
  Synthetic polypeptide representing artificial human antibody VH domain
EVQLVESGGGLVQPGRSLRLSCAASGFTFDDYAMHWVRQAPGKGLEWVSGISWNSNIIGYADSVKGRFTISRDNAKNSLSLQMLSLRAEDTALYYCAKGQYTSIWYGGIDSWGQGTLVTVSS

SEQ ID NO: 18432 - protein, 126 aa, Artificial Sequence
  Synthetic polypeptide representing artificial human antibody VH domain
EVQLLESGGGLVQPGGSLRLSCAASGLTFSSYAMSWVRQAPGKGLEWVSIIYSGDSSTHYADSVKGRFTISRDNSKNTLYLQMNSLRADDTAVYFCASDDRTNYYYNSGYSNFDYWGQGTLVTVSS

SEQ ID NO: 18433 - protein, 126 aa, Artificial Sequence
  Synthetic polypeptide representing artificial human antibody VH domain
EVQLLESGGGLVQPGGSLRLSCAASGLTFSKFAMSWVRRAPGKGLEWVSILYSDDGATYHADSVKGRFTISRDNSKNTIYLQMNSLRVDDTGVYFCAADDRRTYYENSGYANFDYWGQGTLVTVSS

SEQ ID NO: 18434 - protein, 118 aa, Artificial Sequence
  Synthetic polypeptide representing artificial human antibody VH domain
EVQVVESGGGLVQPGRSLRLSCTTSGFNFGEDAMSWFRQAPGKGLEWVSFIRSKAFDWTTEYAASVRGRFTISRDDSKSIVYLQMNSLKTEDTGVYYCARRALSPSSWGQGTLVTVSS

SEQ ID NO: 18435 - protein, 120 aa, Artificial Sequence
  Synthetic polypeptide representing artificial human antibody VH domain
QVHLQESGPGLVKPSETLSLTCTVSGGSVDGYFWSWIRQPPGKGLEWIGYIYYSGSTNYNPSLNSRVTISVDRSNNHFSLKLNSLTAADTAVYYCTRHLGRQRDYGWDAWGLGTPVTVSS

SEQ ID NO: 18436 - protein, 121 aa, Artificial Sequence
  Synthetic polypeptide representing artificial human antibody VH domain
EVQLVESGGGLVQPGRSLRLSCAASGFAFDDSAMHWVRQAPGKGLEWVSGITWNSGNIGYADSVKGRFTISRDNAKNSLYLHMNSVRAEDTALYYCVKDRGVSYHLYFDYWGQGTLVTVSS

SEQ ID NO: 18437 - protein, 127 aa, Artificial Sequence
  Synthetic polypeptide representing artificial human antibody VH domain
QLQLQESGPGLVKPSETLSLTCTVSGGSISSSSYYWGWIRQPPGKGLEWIGSIYYSGSTYYNPSLKSRVTISVDTSKNQFSLKLSSVTAADTAVYYCAGGKKQWLVLNREVHWFDPWGQGTLVTVSS

SEQ ID NO: 18438 - protein, 122 aa, Artificial Sequence
  Synthetic polypeptide representing artificial human antibody VH domain
QVHLVESGGGVVQPGGSLRLSCAVSQFTIQNSIIHWVRQAPGKGLEWVAAMSHDGISKYYADSVKGRLTISRDSSAKTVDVHMDSLTPEDTAIYYCATEGGSSGKCGYFDYWGQGTLVTVSS

SEQ ID NO: 18439 - protein, 118 aa, Artificial Sequence
  Synthetic polypeptide representing artificial human antibody VH domain
QVQLQESGPGLVKPSETLSLTCTVSGGSISSYYWSWIRQPPGKGLEWIGYIYYSGTTNYNPSLKSRVTISVDTSKNQFSLKLSSVTAADTAVYYCARSYSNGQSPGYWGQGTLVTVSS

SEQ ID NO: 18440 - protein, 120 aa, Artificial Sequence
  Synthetic polypeptide representing artificial human antibody VH domain
QVQLVQSGPEVKRPGASVKVSCKSSGYPFTGYYIDWVRQAPGHGLEWMGRINPNGGDTNYAEKFRGFVTMTRDTSINTAYLELAGLTSDDTAMYYCARHRGGYDSRLPYWGQGTLVTVSS

SEQ ID NO: 18441 - protein, 121 aa, Artificial Sequence
  Synthetic polypeptide representing artificial human antibody VH domain
QVQLVESGGGVVQPGRSLRLSCAASGFTFSSYGMHWVRQAPGKGLEWVVLISYDGSNKYYADSVKGRFTISRDNSKNTLYLQMNSLRPEDTAVYYCAAGHKGNYYYGMDVWGQGTTVTVSS

SEQ ID NO: 18442 - protein, 125 aa, Artificial Sequence
  Synthetic polypeptide representing artificial human antibody VH domain
EVQLVESGGGLVKPGESLRLSCVASGFTFSGYSMNWVRQAPGKGLEWVSSLSLSSGTPYYADSVKGRFTISRDNAKNTLYLHMSSLRAEDTALYYCARDLYFYDDNIGYYVQDYWGQGALVTVSS

SEQ ID NO: 18443 - protein, 122 aa, Artificial Sequence
  Synthetic polypeptide representing artificial human antibody VH domain
QLQLQESGPGRVKPSETLSLTCSVSGDSITRRHSYWAWIRQPPGKGLEWLGSFDYTGSPFYNPSLKSRVTIFADGSETQFSLKVTSVTAADTAVYYCARHLKKSGIYQFDYWGPGNLVSVSS

SEQ ID NO: 18444 - protein, 123 aa, Artificial Sequence
  Synthetic polypeptide representing artificial human antibody VH domain
EVQLVESGGGLIQPGGSLRLSCAASGFTVSSSYMSWVRQAPGKGLEWVSIIYSGGSTYYADSVKGRFTISRDNSKNTLYLQINSLRDEDTAMYYCARSRGYSGYRGGYYFEYWGRGALVTVSS

SEQ ID NO: 18445 - protein, 117 aa, Artificial Sequence
  Synthetic polypeptide representing artificial human antibody VH domain
EVQVLQSGGGLAQPGGSLRLSCVASGLTFSGFTMSWVRHPPGKGLEWVSDISGGGVTNYADFVRGRFIISRENSKNTLYLQMNSLRAEDTAVYYCVPRYTNHWFDNWGQGTLVTVSS

SEQ ID NO: 18446 - protein, 123 aa, Artificial Sequence
  Synthetic polypeptide representing artificial human antibody VH domain
QVQLVQSGAEVKKPGSSVKVSCKASGGSFSNYVINWVRQAPGQGLEWMGGIMPIFGTTNYAQKFQGRLTITADGSTTTAYMELGSLRSEDTAVYFCARALYSSNWFKDAFDIWGQGTNVTVSS

SEQ ID NO: 18447 - protein, 121 aa, Artificial Sequence
  Synthetic polypeptide representing artificial human antibody VH domain
EVSVVESGGGLVKPGGSLRLSCTTSKFGFTTSGLSWVRQAPGKGLEWVSSIDATSTYTYYTASASGRFTVSRDNTKNSVFLQMNSLADEDTGVYFCARDLGRRFYYGMDVWGQGITVTVSS

SEQ ID NO: 18448 - protein, 123 aa, Artificial Sequence
  Synthetic polypeptide representing artificial human antibody VH domain
QVQLVESGGGVVQPGGSLRLSCAASGFTLSNCGMHWVRQAPGKGLEWVAVISYDGSKKWFAESVKGRFTISRDKSQNTLFLQMNSLRHEDTAVYYCAKDLFRASSELRALDYWGQGILVTVSS

SEQ ID NO: 18449 - protein, 121 aa, Artificial Sequence
  Synthetic polypeptide representing artificial human antibody VH domain
QVQLVQSGAELRQPGASVKVSCQASGYTFTRHAIHWVRQAPGQRLEWMGWIITDSGNTKYSQKFQGRVTFTRDTSATTVYMEASSLTSEDTAVYYCSKGGAAPPGNWFDRWGQGTLVTVSS

SEQ ID NO: 18450 - protein, 124 aa, Artificial Sequence
  Synthetic polypeptide representing artificial human antibody VH domain
QVELVESGGGMVAPGTSLRLSCGDPALNFTKDATQWVRQAPGRGLEWMGVIAHDGHQIYYAESVKGRVSISRDTSGDRVYFQLNSLRPEDTAVYFCAKVHWHSSNPYWGGLDPWGQGTLVTVSS

SEQ ID NO: 18451 - protein, 120 aa, Artificial Sequence
  Synthetic polypeptide representing artificial human antibody VH domain
QVQLVQSGSELKKPGASVKVSCKASGYSFTSYSMNWVRQAPGQGLEWMGWINPDTGYARYARGFTGRFVFSLDTSVSTAYLQISDLKADDTAVYYCARGNRIGGTSGHYWGQGTRVTVSS

SEQ ID NO: 18452 - protein, 117 aa, Artificial Sequence
  Synthetic polypeptide representing artificial human antibody VH domain
EVQVLQSGGGLAQPGGSLRLSCVASGLTFSGFTMSWVRHAPGKGLEWVSDISGSGVTDYGNFVKGRFTISRENSKNTLYLQMNSLRVDDTAVYYCVPRYTSHWFDNWGQGTLVTVSS

SEQ ID NO: 18453 - protein, 122 aa, Artificial Sequence
  Synthetic polypeptide representing artificial human antibody VH domain
EVQVVESGGGLIQPGGSLRLSCAVSGVTVSHHYAAWVRQAPGKGLEWVSVIYSSGPTYYAESVRGRFDISRDNSKNTVYLQMNSLSAEDTAVYYCAIKTAYCGSDCYRFDHWGQGALVTISS

SEQ ID NO: 18454 - protein, 119 aa, Artificial Sequence
  Synthetic polypeptide representing artificial human antibody VH domain
QVQLVQSGAEVTKPGASVKVSCKASGYTFTTSPLHWVRQAPGQSLEWMGWINAGDGHTHYSQTFRDRLTFTRDTSASTAFMELSSLTSADTAIYYCARDGHYGWAFDIWGQGTMITVSS

SEQ ID NO: 18455 - protein, 117 aa, Artificial Sequence
  Synthetic polypeptide representing artificial human antibody VH domain
QVQLVQSGAEVARPGASVRLSCTTSGHSFNYYFIHWVRQAPGQGLEWLGRINPRDGDTDFAQHLQGRLTLTRDTSTSTVYMLLSGLKSDDTAVYYCARHRSVTLDFWGQGALVTVSS

SEQ ID NO: 18456 - protein, 121 aa, Artificial Sequence
  Synthetic polypeptide representing artificial human antibody VH domain
QVQLVQSGAEVKKPGASVKISCKASGYNFFNHAIHWVRQAPGQRLEWMGWIITGNGETKYSQNFQGAVTITRDTSATTVYMEMSSLSSKDTAMYYCARGGSAPPGNWFAAWGQGTLVTVSS

SEQ ID NO: 18457 - protein, 127 aa, Artificial Sequence
  Synthetic polypeptide representing artificial human antibody VH domain
EVQVVESGGGLVKPGGSLRLSCTASGVPFSNAWMSWFRQAPGKGLEWVGRIRSKSDGEKVDHVAPVEGRFTISRDDSRNTLYLQMNSLKTEDTGVYYCTTDRGIRVGEYHYYGMDVWGQGTTVIVSS

SEQ ID NO: 18458 - protein, 115 aa, Artificial Sequence
  Synthetic polypeptide representing artificial human antibody VH domain
EVRLVESGGGLIQPGGSLRLSCAASGFTVTSNYMSWVRQAPGKGLEWVSIIYSGGTTYYADSVKGRFTISRDNSKNTLYLQMNSLRAEDTAVYYCARDFWSGLYWGQGTLVTVSS

SEQ ID NO: 18459 - protein, 125 aa, Artificial Sequence
  Synthetic polypeptide representing artificial human antibody VH domain
QITLKESGPALVKPTQTLTLTCTFSGFSLTTSGVGVGWIRQPPGEALDWLAVIYWDDDKRYNPSLQNRLTLTKDTSNNLVVLTMTNMDPVDTATYYCAHRLMSGSPWPWGYFDYWGQGRLVTVSS

SEQ ID NO: 18460 - protein, 120 aa, Artificial Sequence
  Synthetic polypeptide representing artificial human antibody VH domain
QVQLVQSGSELKKPGASVKVSCKASGYTFSDYSMNWVRQAPGQGLEWMGWINPDTGYTRYARGLTGRFVFSLDTSVSTVYLQISDLRADDTAVYFCARGARIGGTAGHYWGQGSRVTVSS

SEQ ID NO: 18461 - protein, 118 aa, Artificial Sequence
  Synthetic polypeptide representing artificial human antibody VH domain
EVYLVESGGGLVKPGGSLRLSCAASGFTFSSYSMNWVRQAPGRGLEWVSFITASSAYIDYADSLKGRFTISRDNAKNSLYLQMHNLRAEDTAVYYCASDPRTTLFDYWGQGTLVTVSS

SEQ ID NO: 18462 - protein, 123 aa, Artificial Sequence
  Synthetic polypeptide representing artificial human antibody VH domain
EVQLVQSGTEVKEPGESLSLSCKTSGYTFTDYWIGWVRQLPGKGLEWMGIIHGGDSDTIYSPSLQGHVTLSADKSITTAYLHCSSLKASDTAMYYCARLLPLEGPAAPNFDYWGQGTLVTVSS

SEQ ID NO: 18463 - protein, 132 aa, Artificial Sequence
  Synthetic polypeptide representing artificial human antibody VH domain
QVQLVQSGAEVKTPGASMKISCRASGYTFTNYYIHWVRQAPGHGLEWMGIIDPSGGSTSHPQSFQGRLTMTRDTSTNTVYLELSSLRSDDTAVYYCARSSLSSRLALIIVVNYPNFYYFDSWGQGSLLTVSS

SEQ ID NO: 18464 - protein, 122 aa, Artificial Sequence
  Synthetic polypeptide representing artificial human antibody VH domain
EVQLAESGGGLVQPGGSLRLSCALSGSTISGYWMHWVRQAPGKGLVWVSRSDGSRTSYAESVKGRFTISRDDAKHTVYLHMNSLRAEDTAVYYCARSHYVGSESYRDALDIWGHGTMVTVSS

SEQ ID NO: 18465 - protein, 120 aa, Artificial Sequence
  Synthetic polypeptide representing artificial human antibody VH domain
EVQLLESGGGLVQPGGSLRLSCAASGFTFNNCAMTWVRQAPGKGLEWVSGITNSGDLTYYTDSVRGRFTISRDNSKNTLFLQMNNLRAEDTATYYCAKLIGALRGATDHWGQGTLVTVSS

SEQ ID NO: 18466 - protein, 122 aa, Artificial Sequence
  Synthetic polypeptide representing artificial human antibody VH domain
EVQLLESGGGLVQPGGSLRLSCAAAGFNFSNFAMGWVRQAPGKGLEWVSVIRIVSPIGGSTFYADSVKGRFTISRDNSKNTVHLQMNNLRAEDTAIYYCAKTHISGWCFDYWGQGTQVTVSS

SEQ ID NO: 18467 - protein, 129 aa, Artificial Sequence
  Synthetic polypeptide representing artificial human antibody VH domain
EVRLLESGGGLVQPGGSLRLSCAVSGLSFSRRYAMSWVRQAPGKGLEWVSGISDSGVGTYYVDSVKGRFTISRDNAKNVVYLQMNSLRAEDTATYYCAKESAALLWVGAEKKGNWFDPWGQGTLVTVAS

SEQ ID NO: 18468 - protein, 121 aa, Artificial Sequence
  Synthetic polypeptide representing artificial human antibody VH domain
QVQLVQSGAELRQPGASVKISCQASGYTFSRHSIHWVRQAPGQRLEWMGWIIIDSGETKYSQKFQGRVTFTRDTSANTVYMESNSLTSEDTAVYYCSKGGAAPPGNWFDRWGQGTLVTVSS

SEQ ID NO: 18469 - protein, 121 aa, Artificial Sequence
  Synthetic polypeptide representing artificial human antibody VH domain
EVQLVESGGGLVQPGRSLRLSCAASGFTFSTYWMNWVRQAPGKGLEWVANIKQDGSEKYHVDSVKGRFTISRDNAKNSLYLQMNNLRGEDTAVYYCARGLRWFGELEFDPWGQGTLVTVSS

SEQ ID NO: 18470 - protein, 124 aa, Artificial Sequence
  Synthetic polypeptide representing artificial human antibody VH domain
EVQLLESGGALVQPGGSLRLSCTVSGFTFSDYAMSWVRQTPGKGLEWVSSISGSGLMTYYADSVKGRFTISRDNSKDTMNLYINIVRAEDTAIYYCAKGPGLRWELVRRYFERWGQGTLVSVSS

SEQ ID NO: 18471 - protein, 120 aa, Artificial Sequence
  Synthetic polypeptide representing artificial human antibody VH domain
EVQLVESGGGLVQPGGSLRLSCAASGFTFSTYWMHWVRQAPGKGLVWVSRINSDGTTTNYADSVQGRFTISRDSAKSTLYLHMNSLGAEDTAVYYCTRDSAGATPAFDFWGQGTLVTVSS

SEQ ID NO: 18472 - protein, 127 aa, Artificial Sequence
  Synthetic polypeptide representing artificial human antibody VH domain
EVQLVESGGGLVKPGGSLRLSCAASGFTFSSYSMNWVRQAPGKGLEWVSYISSSSSYIYFADSVKGRFTISRDNAKNSLYLQMNSLRAEDTAVYYCARDGRLHLGELSLYWPSFDYWGQGTLVTVSS

SEQ ID NO: 18473 - protein, 122 aa, Artificial Sequence
  Synthetic polypeptide representing artificial human antibody VH domain
EVQLLESGGGLVQPGGSLRLSCAASGFTFRNYAMSWVRQAPGKGLEWVSTFSGSGGNTYYADSVKGRFTISRDNSKNTLYLQMNSLRAEDTAVYYCAKVRVVITPNDGFDIWGQGTMVTVSS

SEQ ID NO: 18474 - protein, 124 aa, Artificial Sequence
  Synthetic polypeptide representing artificial human antibody VH domain
EVRLVESGGGLVQPGGSLRLSCTASGFTFAGYWMHWVRQSPRKGLLWVSRINRGGTRISYADSVKGRFIISRDDARNTLFLQMNSLRDEDTAVYYCVRSHYEGSESFRDAFDIWGHGTMVSVSS

SEQ ID NO: 18475 - protein, 122 aa, Artificial Sequence
  Synthetic polypeptide representing artificial human antibody VH domain
QVQLVQSAAEVKKPGASVKVSCKASGYTFTNYGVSWLRQAPGQGLEWVAWISAYNGKTNYAQNVQGRVTMTTDTSSSTAYMELRSLRSDDTAVYYCARDGPDYGDYVNFDYWGQGTLVTVSS

SEQ ID NO: 18476 - protein, 126 aa, Artificial Sequence
  Synthetic polypeptide representing artificial human antibody VH domain
EVQLLESGGDLVQPGGSLRLSCAASGFTFSSYAMDWVRQAPGKGLEWVSSISPIGDYIYYADSVKGRFTSSRDNSKNTLFLQMDSLRAEDTALYYCAKRRGNLVRGRVTGDGMDVWGQGTTVTVSS

SEQ ID NO: 18477 - protein, 120 aa, Artificial Sequence
  Synthetic polypeptide representing artificial human antibody VH domain
QVQLVQSGAEVKKPGASVQVSCKTSGYTFTDYFIHWVRQAPGQGFEWMGRIKITPHSGDTHYAQKFQGRVTMTRDTSISTAYMELNRLTSDDTAVYYCARDGQWFDLDYWGQGTLVTVSS

SEQ ID NO: 18478 - protein, 124 aa, Artificial Sequence
  Synthetic polypeptide representing artificial human antibody VH domain
EVLLLESGGGLVQPGGSLRLSCTASGFNFNSYAMSWVRQAPGKGLEWVAIISSTGSTTYYPDSVQGRFTISRDQTTNTLFLQMNSLRVEDTAIFYCVKDLRGGIADRDSVFHLWGHGTTVTVSS

SEQ ID NO: 18479 - protein, 125 aa, Artificial Sequence
  Synthetic polypeptide representing artificial human antibody VH domain
EVQLLESGGGLVQPGGSLRLSCAASGFTFRTYDMTWVRQAPGKGLEWVSAIVGSGDITFYADSVKGRFTISRDNSKNTLYLLMNTLRAEDTAVYYCAKGLTGLRYSPSPQYFQHWGQGTLVTVSS

SEQ ID NO: 18480 - protein, 122 aa, Artificial Sequence
  Synthetic polypeptide representing artificial human antibody VH domain
EVQLVESGGMLVKPGGSLRLSCEVSGFTFSNTLMSWVRQAPGKGPEWVGRIKRKSDGETTDYAAPVKGRFTISRDDSQNMLFLQLTNLKSDDTAVYYCTTGLAASTYYVDYWGRGTLVTVSS

SEQ ID NO: 18481 - protein, 117 aa, Artificial Sequence
  Synthetic polypeptide representing artificial human antibody VH domain
EVQVLQSGGGLAHPGGSLRLSCVASGLTFSGFTMSWVRHAPGKGLEWVSDISGGGVTDYADSAKGRFTISRENSKNTLFLQMNSLRAEDTAMYYCVPRYTNHWFDKWGQGTLVTVSS

SEQ ID NO: 18482 - protein, 119 aa, Artificial Sequence
  Synthetic polypeptide representing artificial human antibody VH domain
QVQLVQSGAEVRKPGASVKISCKASGYTFTRNPLHWVRQAPGQSLEWMGWVNAGDGATKYSQTFQNRVTFTRDTSASTAFMELTSLTSEDTAVYYCARDGQYGWAFDIWGQGTMVTVSS

SEQ ID NO: 18483 - protein, 121 aa, Artificial Sequence
  Synthetic polypeptide representing artificial human antibody VH domain
EVQLEESGGGLVTPGGSLRLSCAASGFPFSTSDMSWVRQAPGKGLEWVSSITQSSSFTYYTESVRGRFTISRDDAKNTLYLQMSSLRVEDMGHYYCARDLGRRFFYGMEIWGQGTAVIVSS

SEQ ID NO: 18484 - protein, 121 aa, Artificial Sequence
  Synthetic polypeptide representing artificial human antibody VH domain
QITLKESGPTLVKPTQTLTLTCTFSGFSLSTSGVGVGWIRQPPGKALEWLALIYWDDDKRYSPSLKSRLTITKDTSKNQVVLTMTNMDPVDTATYYCAQGVGGWNPWFDPWGQGTLVTVSS

SEQ ID NO: 18485 - protein, 122 aa, Artificial Sequence
  Synthetic polypeptide representing artificial human antibody VH domain
QVQLVESGGGVVQPGRSLRLSCAASEFTFSNYGMHWVRQAPGKGLEWVALIWYDGSNKYYADSVKGRFTISRDNSKNTLYLQMNSLRAEDTAVYYCARDVYSSTWDYYFDYWGQGTLVTVSS

SEQ ID NO: 18486 - protein, 123 aa, Artificial Sequence
  Synthetic polypeptide representing artificial human antibody VH domain
QVQLVQSASDLKKPGASVTVSCKASGYTLTSYAINWVRQAPGQGLEWMGWINTNTGNPTYAQGFTGRFAFSSDTSVSTAYLQITSLKADDTAVFYCVRDRTNSYGLGSNAVYWGQGTLVTVSS

SEQ ID NO: 18487 - protein, 124 aa, Artificial Sequence
  Synthetic polypeptide representing artificial human antibody VH domain
EVQLVESGGALVQPGGSLRLSCVASGFTLSAYWMHWVRQVPGKGLVWVSRIRSDVGITNYADSVKGRFTVSRDSAKNTVYLQMNSLRVEDTAVYYCTRSHYSGSESYRDSLDIWGQGTMVTVSS

SEQ ID NO: 18488 - protein, 117 aa, Artificial Sequence
  Synthetic polypeptide representing artificial human antibody VH domain
QVQPVQSGAEVRQPGASVKVSCKAPEYTSTGDYVHWVRQAPGQGLEWMGVVTPSGENSGQAQKFQGRTTMTRDMSTNTVHVEMSSLTYEDTAVYYCARGGRYQFDSWGQGTRVTVSS

SEQ ID NO: 18489 - protein, 119 aa, Artificial Sequence
  Synthetic polypeptide representing artificial human antibody VH domain
QVQLVQSGAEVRKPGASVKVSCKASGYTFTNNPLHWVRQAPGQSLEWMGWINPGAGDIRYSQTLQDRVTFTKDTSASTAFMELSSLTSEDTAVYYCARDGRYGWAFDMWGQGTRVTVSS

SEQ ID NO: 18490 - protein, 124 aa, Artificial Sequence
  Synthetic polypeptide representing artificial human antibody VH domain
EVQLLESGGGLVQPGGTLRLSCAASGFTFNNFAMAWVRQAPGEGLQWVSSIFGSGSGTYFADSVKGRFTISRDNSKNMLYLEMNSLRAEDTAVYYCAKQSGPGNFIVYWYFDLWGRGTQVTVSS

SEQ ID NO: 18491 - protein, 121 aa, Artificial Sequence
  Synthetic polypeptide representing artificial human antibody VH domain
QVQLVQSGAEVKKPGASVKVSCKASGYTFTNHAIHWVRQAPGQRLEWMGWIITGNGETKYSQNFQGAVTITRDTSATTVYMELSSLRSKDTAIYYCARGGSAPPGNWFAAWGQGTLVTVSS

SEQ ID NO: 18492 - protein, 126 aa, Artificial Sequence
  Synthetic polypeptide representing artificial human antibody VH domain
EVQLVESGGGLVKPGGSLRLSCVASGFSFDKVWMSWVRQAPGKGLEWVGRIKSKSDGGTTDYAAPVKGRFTISRDDSKNTLYLQLNRLKTEDTAVYHCQSGPTGTPNYYYYDMDVWGQGTTVTVSS

SEQ ID NO: 18493 - protein, 121 aa, Artificial Sequence
  Synthetic polypeptide representing artificial human antibody VH domain
QVQLVESGGGVVQPGRSLRVSCAASGFTFSHHAMHWVRQAPGKGLEWVGIIWFDGSNTYYGESVKGRFTISRDNSKNTLYLQMNSLRDEDTAVYYCARESRDVAAAGYDFWGQGTRVTVAS

SEQ ID NO: 18494 - protein, 124 aa, Artificial Sequence
  Synthetic polypeptide representing artificial human antibody VH domain
QVQLVQSGAEVKKPGASVKVSCKASEYTFTDYAMHWVRLAPGQGFEWMGWINAANGNTKYSQKFQGRVTITRDTSASTAYMELSRLRSEDRAVYYCARGCYSSGCGRLKEFDYWGQGTLVTVSS

SEQ ID NO: 18495 - protein, 115 aa, Artificial Sequence
  Synthetic polypeptide representing artificial human antibody VH domain
QVQLVESGGGVAQPGRSLRLSCAASGFSFSSFGMHWVRQAPGKGLEWVALIWYRGIYYADSVRGRFTISRDNSKNTLYLQMNSLRVEDTAVYYCARLESGFLDLWGQGTLVTVSS

SEQ ID NO: 18496 - protein, 125 aa, Artificial Sequence
  Synthetic polypeptide representing artificial human antibody VH domain
EVQLVQSGAEMKKPGESLKISCKGSGYTFTNYWIGWVRQLPGKGLEWMGIIFAYDSDTRYSPSFQGQVTISVDKSINTAYLHWNSLEGSDTAMYYCARGSYGDSLRPVGDYFDSWGQGTLVTVSS

SEQ ID NO: 18497 - protein, 126 aa, Artificial Sequence
  Synthetic polypeptide representing artificial human antibody VH domain
EVQLVESGGGLVQPGGSLRLSCEASGFTLSGYWMHWVRQAPGKGLVWVSRIDGDGDGSRTNYADSVKGRFTISRDNAKNTLYLQMNSLRDEDTAVYYCARSHYVGSLNFRDALDIWGQGTMVTVSS

SEQ ID NO: 18498 - protein, 120 aa, Artificial Sequence
  Synthetic polypeptide representing artificial human antibody VH domain
QVQLQQWGAGLLKPSETLSLTCAVYGGSFSDYHWTWIRQPPGKGLEWIGEINQSGTTNYSPSLKSRFTISLDTSNNQFSLTLSSVTAADTAIYYCARAKSGWRPYAVDVWGQGTTVTVSS

SEQ ID NO: 18499 - protein, 122 aa, Artificial Sequence
  Synthetic polypeptide representing artificial human antibody VH domain
EVQLLESGGGLVQPGGSLRLSCAASGFNFSNYAMGWVRQAPGKGLEWVSVIRIISPTGGSTFYADSVKGRFTISRDNSKNTVYLQMNNLRAEDTAIYYCAKTHISGWCFDYWGQGTLVTVSS

SEQ ID NO: 18500 - protein, 121 aa, Artificial Sequence
  Synthetic polypeptide representing artificial human antibody VH domain
QVQLVQSGAELRQPGASVKVSCKASGYTFTNNAIHWVSQAPGQRLEWMGWIITDSGRTKYSQKFQDRVTITRDTSANIVYMELNSLRSEDTAVYYCARGGAAPPGNWFDRWGQGTLVIVSS

SEQ ID NO: 18501 - protein, 118 aa, Artificial Sequence
  Synthetic polypeptide representing artificial human antibody VH domain
EVQLVESGGGIVQPGGSLRLSCAASGFTFSTYWMHWVRQVPGKALEWVSRINDDATDTTYADSVKGRFIVSRDNVKNTLDLQMNSLREDDTALYYCGRDGMVTGIDNWGQGTLVTVSS

SEQ ID NO: 18502 - protein, 123 aa, Artificial Sequence
  Synthetic polypeptide representing artificial human antibody VH domain
QVQLQESGPGLVKPSQTLSLTCTVSGASIGSGGYYWTWIRQHPEKGLEWLGYIWYSGSTNYNPSLTSRLSISADRSKNHFSLKLTSVTAADTAVYYCARERGTYSPLGAFDIWGQGLMVTVSS

SEQ ID NO: 18503 - protein, 119 aa, Artificial Sequence
  Synthetic polypeptide representing artificial human antibody VH domain
EVQLVESGGGLIQPGGSLRLSCAASGFSVSATYMAWVRQAPGRGLESISIIGGPTYYAESVKGRFIISRDTYTNTLDLQMNSLRGEDTAIYFCARFCGTYNSPCGFDSWGQGTLVTVSS

SEQ ID NO: 18504 - protein, 124 aa, Artificial Sequence
  Synthetic polypeptide representing artificial human antibody VH domain
EVHLVESGGGLVQPGGSLRLSCAGSGFNFRNYWMHWVRQAPGKGLVWVSRMTSDVSRASYADSVKGRFTISRDDAKNTLYLQMNSLRAEDTAVYYCARSHYSGSESYRDAFDFWGQGTVVTVSS

SEQ ID NO: 18505 - protein, 126 aa, Artificial Sequence
  Synthetic polypeptide representing artificial human antibody VH domain
QLQLQESGPGLVKPSETLSLTCTVSGGSISSSSYYWGWIRQPPGKGLEWIGSIYYSGSTYYNPSLKSRVTISVDTSKNQFSLKLSSVTAADTAVYYCARHIGLTKDSSSWYKIDYWGQGTLVTVSS

SEQ ID NO: 18506 - protein, 119 aa, Artificial Sequence
  Synthetic polypeptide representing artificial human antibody VH domain
QVQLQESGPGLVKPSQTLSLTCTVSGGSISSGNYYWSWIRQHPGKGLEWIGYIYYSGSTYYNPSLKSRVTISVDTSKNQFSLKLSSVTAADTAVYYCARAIRYNWFDPWGQGTLVTVSS

SEQ ID NO: 18507 - protein, 127 aa, Artificial Sequence
  Synthetic polypeptide representing artificial human antibody VH domain
EVQLVESGGGLVKPGGSLRLSCAASGFTFSDAWMSWVRQAPGKGLEWVGRIKTKPEGGTLDYAAPVKGRFTVSRDDSKNMLYLQMNTLTTEDTAVYYCTTDRVGTNCGGDCYQFQHWGQGTLVTVSS

SEQ ID NO: 18508 - protein, 118 aa, Artificial Sequence
  Synthetic polypeptide representing artificial human antibody VH domain
EVQLLESGGGLVPPGGSLRLLCAASGLTFDNFAMSWVRQAPGKGLEWVSYISDRGFDTYYADSVKGRFAVSRDNSKKTMSLQMNSLGPEDTAIYYCAKIPPRGPFAIWGQGTMVTVSS

SEQ ID NO: 18509 - protein, 122 aa, Artificial Sequence
  Synthetic polypeptide representing artificial human antibody VH domain
EVQLLESGGDLVQPGGSLRLSCAASGFTFNTYAMHWVRQAPGKGPEWVSAISGSGTSTQTADSVKGRFAISRDNSKNTMYLQMNSLRAEDTAIYYCAKGATGWYVSHYYDFWGQGTLVTVSS

SEQ ID NO: 18510 - protein, 122 aa, Artificial Sequence
  Synthetic polypeptide representing artificial human antibody VH domain
EVQLLESGGGLVQPGGSLRLSCAASGFTFSNYAMSWVRQAPGKGLEWVSSFSGSGGNTYYADSVKGRFTISRDNSKNTLYLQMNSLRAEDTALYYCAKLRAVVTVIEAFDFWGQGTLVTVSS

SEQ ID NO: 18511 - protein, 131 aa, Artificial Sequence
  Synthetic polypeptide representing artificial human antibody VH domain
QVQLVQSGAEVKKPGASVKVSCKASGYTFTSYAMHWVRQAPGQRLEWMGWINAGNGNTKYSQKFQGRVTITRDTSANTAYMELSSLRSEDTAVYYCARGSGSAYYDFWSGYSHHIAPFDYWGQGTLVTVSS

SEQ ID NO: 18512 - protein, 121 aa, Artificial Sequence
  Synthetic polypeptide representing artificial human antibody VH domain
QVQLEQSGPGLVRPSETLTLTCSVSGDSVTSHFYYWSWIRQPPGRGLQWLGYVYYSGRTNYNPSLKSRLTISADTSQNHFSLKLTSVTAADTAVYYCARERELLTKGLDVWGQGTTVTVSS

SEQ ID NO: 18513 - protein, 117 aa, Artificial Sequence
  Synthetic polypeptide representing artificial human antibody VH domain
QVQLVQSGAEVKKPGASVKVSCKASGYTFTGYYMHWVRQAPGQGLEWMGRINPNSGGTNYAQKFQGRVTMTRDTSISTAYMELSRLRSDDTAVYYCARDAEGGFDPWGQGTLVTVSS

SEQ ID NO: 18514 - protein, 127 aa, Artificial Sequence
  Synthetic polypeptide representing artificial human antibody VH domain
QLPLRESGPGLVKPSETLSLACTVSGASIRSSSYYWTWIRQSPGQGLEWIGNLYFNGGTDYNLSLKSRVTISIDTSMNQIAFKLRSLTAADTAVYYCVLGPYYQHNSGQRVGASDVWGQGTLVTVSS

SEQ ID NO: 18515 - protein, 119 aa, Artificial Sequence
  Synthetic polypeptide representing artificial human antibody VH domain
EVQLVESGGGLIQPGGSLTLACAASGFTVMDTYMAWVRQAPGKGLEWVSVIGGAEYYADSVRGRFIIYRDRSKNSVYLEMNSLTSEDTALYYCARVCGSYNSPCGFDSWGQGALVTVSS

SEQ ID NO: 18516 - protein, 120 aa, Artificial Sequence
  Synthetic polypeptide representing artificial human antibody VH domain
QVQLVQSGSELKKPGASVKVSCKASGYTFTKYSLNWVRQAPGQGLEWMGWINPDTGYARYARGFTGRFVFSLDTSVSTAYLQINDLKADDTAVYYCARGNRIGGTSGHYWGQGTRVTVSS

SEQ ID NO: 18517 - protein, 126 aa, Artificial Sequence
  Synthetic polypeptide representing artificial human antibody VH domain
EVQLVESGGGLVKPGRSLRLSCTTSGFTFRDYAMSWFRQAPGKGLEWVAHIAQSNINIFYGGSVLGRFTISRDDAKNSLYLQMNSLRDEDTAVYYCARDGGCFTSSSCYGYGMDVWGQGTTVTVSS

SEQ ID NO: 18518 - protein, 127 aa, Artificial Sequence
  Synthetic polypeptide representing artificial human antibody VH domain
EVQLVESGGGLVKPGGSLRLSCAASGFTFSSYSINWVRQAPGKGLEWVSSISSSSIYIYYADSVKGRFTISRDNAKNSLYLQMNSLRVEDTAVYYCARQARDRSIAARPFSGGFDYWGQGTLVTVSS

SEQ ID NO: 18519 - protein, 128 aa, Artificial Sequence
  Synthetic polypeptide representing artificial human antibody VH domain
QVQLQQWGAGLLKPSETLSLTCAVYGGSFSGYYGGWIRQPPGKGLEWIGEINHSGSTNYNPSLKSRVTISVDTSKNQFSLKLSSVTAADTAVYYCARVKGSYYDFWSGRYRVYGMDVWGQGTTVTVSS

SEQ ID NO: 18520 - protein, 122 aa, Artificial Sequence
  Synthetic polypeptide representing artificial human antibody VH domain
EVQLVESGGGLVQPGGSLRLSCALSGSTISGYWMHWVRQAPGKGLVWVSRSDGSRTSYAESVEGRFTISRDDAKHTVYLHMNSLRAEDTAVYYCARSHYVGSESYRDALDIWGHGTMVTVSS

SEQ ID NO: 18521 - protein, 124 aa, Artificial Sequence
  Synthetic polypeptide representing artificial human antibody VH domain
EVQLLESGGGLVEPGGSLRLSCAASGFTFSIYAMSWVRQAPGRGPEWVSAISANTKNTYYRDSVKGRFTISRDNSKNTLYLQMNSLRAEDTAVYYCAKDLPRPGNAYYFANDYWGQGTLVTVSS

SEQ ID NO: 18522 - protein, 122 aa, Artificial Sequence
  Synthetic polypeptide representing artificial human antibody VH domain
QVQLVESGGGVVQPGRSLRLSCAASGFTFSSYGMHWVRQVPGKGLEWLAVISNDGNTKTYADSVKGRFTISRDNSKSTLFLQMNSLSAEDTALYYCTKACAGGSRCYLIDFWGQGTQVIVSS

SEQ ID NO: 18523 - protein, 128 aa, Artificial Sequence
  Synthetic polypeptide representing artificial human antibody VH domain
EVQLVESGGGLVEPGGSLRLSCVASGFTFGDFAINWVRQAPGQGLEWVSVISGSGDSTFSTYYADSVKGRFTVSRDNSRNTVHLQMNSLRAEDTATYYCAKARAYSRSSVFFFVNSHWGQGTLVTVSS

SEQ ID NO: 18524 - protein, 119 aa, Artificial Sequence; identical to SEQ ID NO: 18454
  Synthetic polypeptide representing artificial human antibody VH domain

SEQ ID NO: 18525 - protein, 123 aa, Artificial Sequence
  Synthetic polypeptide representing artificial human antibody VH domain
QVHLQESGPGLVKPSETLSLTCTVSGVSVSSPSYYWSWIRQPPGKGLEWIGYFHSSGTTISRPSLQSRVTLSLDASENQFSLRLASVTAADTAVYYCARGPWISVWQGGFDYWGRGTLVTVSS

SEQ ID NO: 18526 - protein, 122 aa, Artificial Sequence
  Synthetic polypeptide representing artificial human antibody VH domain
EVQLWESGGGLVQPGGSLRLSCAASELSFSNYVMGWVRQAPGKGLEWVSALAPSGGTSYADSVKGRFTISRDNSKNALYLQMITLRVDDTAVYYCAKGGRDGGGPYTYFDYWGQGTLVTVSS

SEQ ID NO: 18527 - protein, 127 aa, Artificial Sequence
  Synthetic polypeptide representing artificial human antibody VH domain
EVQLVESGGGLVKPGGSLRLSCAASGFTFSDAWMSWIRQAPGKGLEWVGRIKSNSEGGTTDYAAAVKGRFTISRDDSKNTLYLQMNSLKTEDTAVYYCTTDRVGTNCDGYCYQFQHWGQGTLVTVSS

SEQ ID NO: 18528 - protein, 120 aa, Artificial Sequence
  Synthetic polypeptide representing artificial human antibody VH domain
QVQLQESGPGLVKPSGTLSLTCAVSGGSISSSNWWSWVRQPPGKGLEWIGEIYHSGSTNYNPSLKSRVTISVDKSKNQFSLKLSSVTAADTAVYYCARDPKTLRFGVDVWGQGTTVTVSS

SEQ ID NO: 18529 - protein, 117 aa, Artificial Sequence
  Synthetic polypeptide representing artificial human antibody VH domain
EVQVLQSGGGLAQPGGSLRLSCVASGLTFSGFTMSWVRHAPGKGLEWVSDISGGGVTDYADSVKGRFTISRENSKNTLFLQMNSLRAEDTAVYYCVPRYTNHWFDKWGQGTLVTVSS

SEQ ID NO: 18530 - protein, 125 aa, Artificial Sequence
  Synthetic polypeptide representing artificial human antibody VH domain
QVQLVESGGGVVQPGRSLRLSCAGSGFIFSNYGMHWVRQAPGKGLEWVAVISYDGSKKHYADSVKGRFSISKDNSKNTLDLQMNSLRAEDTAVYYCARDRGPWSIAASGTHFDFWGQGTLVTVSS

SEQ ID NO: 18531 - protein, 120 aa, Artificial Sequence
  Synthetic polypeptide representing artificial human antibody VH domain
QVQLVESGGGVVQPGRSLRLSCAASGFTFSGYGMHWVRQAPGKGLEWLAIIAYDGNTIHYADSVKGRFTISRDNSKNTLYLQMNSLRAEDTAVYYCAKAITIFGYYLDFWGHGTPVTVSS

SEQ ID NO: 18532 - protein, 130 aa, Artificial Sequence
  Synthetic polypeptide representing artificial human antibody VH domain
EVQLLESGGGLVQPGGSLRLSCAASGFTFSSYAMSWVRQAPGKGLEWVSAISGSGGSTYYADSVKGRFTISRDNSKNTLYLEMNSLRAEDTAVYYCAKDAEWGTIFGVVIISPGNAFDIWGQGTMVTVSS

SEQ ID NO: 18533 - protein, 125 aa, Artificial Sequence
  Synthetic polypeptide representing artificial human antibody VH domain
QVQLQESGPGLVKPSETLSLTCFVSGGSVTSYYWSWLRQPPGKGLEWIGYVYYSGITNYNPSLKSRVTISVDTSKNQFSLNLSSVTTADTAMYYCAREYPFYSGSWYGGHVFDIWGQGTMVTVSS

SEQ ID NO: 18534 - protein, 127 aa, Artificial Sequence
  Synthetic polypeptide representing artificial human antibody VH domain
EVQLVESGGGLVKPGGSLRLSCTASGVPVSNAWMSWFRQAPGKGLEWVGRIRSESDGEKVDHVAPVEGRFTISRDNSKNTLYLQMNSLKTEDTGVYYCTTDRGMRGGEYHYYGMDVWGQGTSVIVSS

SEQ ID NO: 18535 - protein, 120 aa, Artificial Sequence
  Synthetic polypeptide representing artificial human antibody VH domain
QVQLQESGPGLVKPSETLSLTCTVSGGSIINYFWSWIRQSPGKGLEWIGCSRYNGNTFYNPSLKSRVTLSVDPSKNQFSLRLSSVTAADTAVFYCARHVGSNWYWAFDYWGQGNLVTVSS

SEQ ID NO: 18536 - protein, 125 aa, Artificial Sequence
  Synthetic polypeptide representing artificial human antibody VH domain
QLQLQESGPGLVKPSETLSLTCAVSGGSISSSGYFWVWIRQPPGRGLEWIGSIYYSGNTYYNPSLKSRVTISVDTSKSQFSLKLKSVTATDTAVYYCARHGRPGIVGGTYYFEYWGQGTLVTVSS

SEQ ID NO: 18537 - protein, 129 aa, Artificial Sequence
  Synthetic polypeptide representing artificial human antibody VH domain
EVQLVESGGGLVEPGGSLRLSCAASGFTVSDAYMSWFRQAPGKGLEWVGRVKSIADTGARETAASLRDRFSVSRDDSTSTLFLQMNSLRTEDTAVYYCATDRRPGVCRDTCYNWFPDLWGRGTLVTVSA

SEQ ID NO: 18538 - protein, 123 aa, Artificial Sequence
  Synthetic polypeptide representing artificial human antibody VH domain
QVQLVQSGAEVKKPGASLKVSCKSSGYTFTDYYIHWARQAPGQRLEWMGWINPYSGGTNYAQNFQGRVTMTGDTSIGTAYMELTGLGSDDTAIYYCARAEPIVATTIYYYDYWGQGTLVTVSS

SEQ ID NO: 18539 - protein, 129 aa, Artificial Sequence
  Synthetic polypeptide representing artificial human antibody VH domain
QVQLVQSGAEVRKPGASVKVSCEASGYNFNNFDINWVRQAPGQGLEWVGWLNPLNGKAEYSQKFQGRVTMTRNTSISTDYMELSNLRSDDTAVYFCARGLHDNSGRYYDYYYSYGLDVWGQGTTVTVSS

SEQ ID NO: 18540 - protein, 119 aa, Artificial Sequence
  Synthetic polypeptide representing artificial human antibody VH domain
EVQLVESGGGLVKPGGSLRLSCAGSGFTFSDTYINWVRQAPGKGLEWVGRIKSKSEGETIDFAAPVKGRFSISRDDSRDTVYLQMTSLQIEDTGLYYCTMSREALFDHWGQGTQVIVSS

SEQ ID NO: 18541 - protein, 120 aa, Artificial Sequence
  Synthetic polypeptide representing artificial human antibody VH domain
QVQLVESGGGVVQPGTSLRLSCAPSGFSFSNSVIHWVRQAPDKGLEWLAAIWYDGKNENSVDPAKGRFTISRDNSKNTVYLQMASLRVEDTAVYYCVGERDRNSYRFDYWGQGTLVAVSS

SEQ ID NO: 18542 - protein, 129 aa, Artificial Sequence
  Synthetic polypeptide representing artificial human antibody VH domain
EVQLVESGGGLVKPGGSLRLSCAASGFRFRDAWMTWVRQAPGKGLEWVGQIKSDINGGTTDYAAAVKGRFVISRDDSESTLTLEMNRLKDEDTAVYYCSTSPLFDWTLYASFYWYLEVWGRGTLVTVSS

SEQ ID NO: 18543 - protein, 117 aa, Artificial Sequence
  Synthetic polypeptide representing artificial human antibody VH domain
EVQLVESGGGLVQPGGSLRLSCAASGFTFSVFSMNWVRQAPGKGLEWISYITGNSKTINYADAVRGRFTVSRDNAKNSLYLQMNSLRDGDTAVYFCATSRNWYLESWGQGTLVTVSS

SEQ ID NO: 18544 - protein, 118 aa, Artificial Sequence
  Synthetic polypeptide representing artificial human antibody VH domain
EVQLVESGGGLIQPGGSLRLSCAASGLTVSNSYMHWVRQAPGKGLEWVSVLYSDGRAYYADSVKGRFTISRDNSKNTLYLQMYSLRAEDTAMYYCVRSPSDIYGMDVWGQGTTVTVSS

SEQ ID NO: 18545 - protein, 122 aa, Artificial Sequence
  Synthetic polypeptide representing artificial human antibody VH domain
QVQLVQSGAEVKKPGASVKVSCKASGYTFTGYYMHWVRQAPGQGLEWMGWINPNSGGTNYAQKFQGRVTMTRDTSISTAYMELSRLRSDDTAVYYCARSLSLLWFGENFDYWGQGTLVTVSS

SEQ ID NO: 18546 - protein, 121 aa, Artificial Sequence
  Synthetic polypeptide representing artificial human antibody VH domain
EVQLLESGGGLVQPGGSLRLSCEASGFYFTNYAMSWVRQAPGKGLEWVSDISGGGDNTYYADSVKGRFTISRDNSKNMVYLQMNSLRVEDTAIYYCAKDDTIAGADAFDIWGQGTMVTVSA

SEQ ID NO: 18547 - protein, 121 aa, Artificial Sequence
  Synthetic polypeptide representing artificial human antibody VH domain
EVQLLESGGGLVQPGGSLRLSCEASGFTFSDFAMAWARQAPGKGLEWVSVVNPRGDRTWSIDSVKGRFTISRDNSKNMVYLQMNSLRAEDTAVFYCAKDIEGGKNGGYDEWGQGTLVTVSS

SEQ ID NO: 18548 - protein, 128 aa, Artificial Sequence
  Synthetic polypeptide representing artificial human antibody VH domain
QVQLVESGGGEVQPGRSLRLSCAGSAFTFRNFGMHWVRQAPGKGLEWVAAISYDGENKYYGDSVKGRFDISRDNSKSTLYLQMNSLRPEDTAVYYCGKDEEQCTGGSCFSAYYALDVWGQGTTVTVSS

SEQ ID NO: 18549 - protein, 126 aa, Artificial Sequence
  Synthetic polypeptide representing artificial human antibody VH domain
QVQLQESGPGLVKPAETLSLTCTVSGDSMTGYYWNWLRRPPGKGLEWIGFMHSGENINYSPSLRSRVTVSIDASANTFSLHLTSVTAADTATYYCARGSSGNPFCSGDCPLYFDSWGKGALVTVSS

SEQ ID NO: 18550 - protein, 116 aa, Artificial Sequence
  Synthetic polypeptide representing artificial human antibody VH domain
QVQLVQSGAEVKKPGASVKVSCKASGYTFTGYYMHWVRQAPGQGLEWMGWINPNSGGTNYAQKFQGRVIMTRDTSISTAYMELSRLRSDDTAVYYCANSRSSWLYWGQGTLVTVSS

SEQ ID NO: 18551 - protein, 126 aa, Artificial Sequence
  Synthetic polypeptide representing artificial human antibody VH domain
QVQLQQWGAGLLKPSETLSLTCAVYGGSFSGYYWSWIRQPPGKGLEWIGEINHSGSTNYNPSLKSRVTISVDTSKNQFSLKLSSVTAADTAVYYCARAQSIAARQWFRYYYFMDVWGQGTTVTVSS

SEQ ID NO: 18552 - protein, 124 aa, Artificial Sequence
  Synthetic polypeptide representing artificial human antibody VH domain
QLQLQESGPGLLKPSETLSLTCIVSGDSVSNTNYYWGWIRQPPGKGLEWIGHSYYDDATYYNPSLKSRVTISIDTSRNQFSLRLRSVTAADTAVYYCARDRGRTSDDYYGMDVWGQGTTVTISS

SEQ ID NO: 18553 - protein, 119 aa, Artificial Sequence
  Synthetic polypeptide representing artificial human antibody VH domain
QVQLVQSGSEVKKPGASVKVSCQATGYTFSASGIAWVRQAPGQGLEWMAWISAHNGDTKYAQKFQGRVTVTTDTSTSLAYMELRSLRSDDTAVYFCARDPIGEDGLDVWGQGTTVIVSS

SEQ ID NO: 18554 - protein, 123 aa, Artificial Sequence
  Synthetic polypeptide representing artificial human antibody VH domain
QVQLQQWGAGLLKPSETLSLTCAVYGGSFSGYYWSWIRQPPGKGLEWIGEINHSGSTNYNPSLKSRVTISEDTNQFSLKLSSVTAADTAVYYCARAGYSSSWYSPPVHWFDPWGQGTLVTVSS

SEQ ID NO: 18555 - protein, 129 aa, Artificial Sequence
  Synthetic polypeptide representing artificial human antibody VH domain
QVQLVQSGAEVKKPGSSVKVSCKASGGTFSSYAISWVRQAPGQGLEWMGGIIPIFDTANYAQKFQGRVTITADESTSTAYMDLSSLRSEDTAVYYCARDRGEYQLLIRPAAYYYGMDVWGQGTTVTVSS

SEQ ID NO: 18556 - protein, 124 aa, Artificial Sequence
  Synthetic polypeptide representing artificial human antibody VH domain
EVQLLESGGGLVPPGGSLRLSCAASGFTFSNYAMTWVRQAPGKGLEWVSGISVRGGDIYYADSVKGRFTISRDNSKSTLYLQLNSLRAEDTAVYFCAKDRDGSGWYGRNFFDGWGQGTLVIVSS

SEQ ID NO: 18557 - protein, 122 aa, Artificial Sequence
  Synthetic polypeptide representing artificial human antibody VH domain
EVQLLESGGGLVQPGGSLRLSCAASESSFSIKAMSWVRQAPGKGLEWVATICSTGDCTYYADSVKGRFTISRDNSKNTLYLQMDSLRADDTAVYYCAKDGHNWNLFRYFDLWGRGTLVTVSS

SEQ ID NO: 18558 - protein, 121 aa, Artificial Sequence
  Synthetic polypeptide representing artificial human antibody VH domain
QVQLMESGGGLVNPGGSLRLSCVVSGFPFSEYYMGWIRQAPGKGLEWVSFITSRGEYTSYADSVKGRFTVSRDNAKNSVYLQMNSLRLEDTATYYCVREGRGSIASFGHHWGRGTLVTVSS

SEQ ID NO: 18559 - protein, 121 aa, Artificial Sequence
  Synthetic polypeptide representing artificial human antibody VH domain
EVQLVESGGGLVQPGGSLRLSCAASGFTVSSNYMSWVRQAPGKGLEWVSVIYSGGSTYYADSVKGRFTISRDNSKNTLYLQTNSLRAEDTAVYYCATLVLPAAGGYYFDYWGQGTLVTVSS

SEQ ID NO: 18560 - protein, 125 aa, Artificial Sequence
  Synthetic polypeptide representing artificial human antibody VH domain
QVQLVQSGAEVKKPGASVKVSCKASGYTFTSYGISWVRQAPGQGLEWMGWISAYNGNTNYAQKLQGRVTMTTDTSTSTAYMELRSLRSDDTAVYYCARDWNSGYIFYYYYGMDVWGQGTTVTVSS

SEQ ID NO: 18561 - protein, 125 aa, Artificial Sequence
  Synthetic polypeptide representing artificial human antibody VH domain
EVQLVESGGGLVHPGGSLRLSCAASGFTFSTSNMNWVRQAPGKGLEWVSYIGPSSTPILYADSVRGRFTISRDNAKNSLYLEMNSLRAEDTALYYCARTPYSSSSGYYYYGMDVWGQGTTVTVSS

SEQ ID NO: 18562 - protein, 127 aa, Artificial Sequence
  Synthetic polypeptide representing artificial human antibody VH domain
EVQLVESGGGLVEPGRSLRLSCTASGFNFGEYAISWFRQAPGKGLEWVGFIRSQPYGETTEYAASVKGRFSISRDDSNSIAYLLMNSLKTEDSGVYFCTRGGYCSTTTCDWVISDFWGQGTLVTVSS

SEQ ID NO: 18563 - protein, 121 aa, Artificial Sequence
  Synthetic polypeptide representing artificial human antibody VH domain
QVQLVQSGAEVKKPGASVKVSCKASGYRFSDYFIHWVRQAPGQGLEWMGWISGNNGGPTIAQKFQGRVTMTRETSINTVYMEVRSLRTDDTAMYYCVRDEAATGSNEYDVWGQGTMVTVSS

SEQ ID NO: 18564 - protein, 130 aa, Artificial Sequence
  Synthetic polypeptide representing artificial human antibody VH domain
QVQLVQSGAEVKKPGASVKVSCKASGYTFTSYGISWVRQAPGQGLEWMGWISAYNGNTNYAQKLQGRVTMTTDTSTSTAYMELRSLRSDDTAVYYCARDLALTTIFGVVIIDYYYGMDVWGQGTTVTVSS

SEQ ID NO: 18565 - protein, 126 aa, Artificial Sequence
  Synthetic polypeptide representing artificial human antibody VH domain
QVQLQESGPGLVKPSQTLSLTCTVSGGSISSGSYYWSWIRQPAGKGLEWIGRIYTSGRTNYNPSLKSRVTISVDTSKNQFSLKLSSVTAADTAVYYCARAPFHYDFWSGPNWFDPWGQGTLVTVSS

SEQ ID NO: 18566 - protein, 122 aa, Artificial Sequence
  Synthetic polypeptide representing artificial human antibody VH domain
EVQLVESGGGLVQPGGSQRLSCAASGFTLTTFWMHWVRQVPGHGLVWVARINSDGTVVTYADSVRGRFIIARDNSRNTLSLQMNSLRPEDTAVYYCARGDGYVDNSGELDYWGQGVLVTVSS

SEQ ID NO: 18567 - protein, 125 aa, Artificial Sequence
  Synthetic polypeptide representing artificial human antibody VH domain
QVQLVQSGAEVKKPGSSVKVSCKASGGTFSNYAISWVRQAPGQGLEWMGGIIPIFGTTNYAQKFQGRVTITADESTSTAYMELSSLRSEDTAVYYCARNYYGSGNYYKPYAFDIWGQGTMVTVSS

SEQ ID NO: 18568 - protein, 125 aa, Artificial Sequence
  Synthetic polypeptide representing artificial human antibody VH domain
EVQLVESGGGLVKPGGSLRLSCAASGFTFSSYSMNWVRQAPGKGLEWVSSISSSSSYIYYADSVKGRFTISRDNAKNSLYLQMNSLRAEDTAVYYCASHPAAADTTYYYYGMDVWGQGTTVTVSS

SEQ ID NO: 18569 - protein, 129 aa, Artificial Sequence
  Synthetic polypeptide representing artificial human antibody VH domain
QVTLRESGPALVKPTQTLTLTCTFSGFSLSTSEMCVSWIRQPPGKALEWLALIDWDDDKYYSTSLKTRLTISKDTSKNQVVLTMTNMDPVDTATYYCARIPVTFGELLGDYYYYGMDVWGQGTTVTVSS

SEQ ID NO: 18570 - protein, 128 aa, Artificial Sequence
  Synthetic polypeptide representing artificial human antibody VH domain
QVQLVESGGGVVQPGRSLRLSCAASGFTFSSYGMHWVRQAPGKGLEWVAVISYDGSNKNYADSVKGRFTISRDNSKNTLYLQMNSLRAEDTAVYYCAKDQIRGYSSGWTYYYYGMDVWGQGTTVTVSS

SEQ ID NO: 18571 - protein, 122 aa, Artificial Sequence
  Synthetic polypeptide representing artificial human antibody VH domain
QVQLVQSGPEVKKPGASVKVSCKTSGYIFSNYVVSWVRQAPGQGFEWMGWISGDKGNTDYAQKFQGRVTMTTDTSTSTAYLEVRSLRSDDTAVFYCARDQPTGRGYGLFDFWGQGTQVTVSS

SEQ ID NO: 18572 - protein, 122 aa, Artificial Sequence
  Synthetic polypeptide representing artificial human antibody VH domain
EVQLVESGGGLVKPGGSLRLSCAASGFTFSSYSMNWVRQAPGKGLEWVSSISSSFNYIYYADSVKGRFTISRDNAKNSLYLQMNSLRAEDTAVYYCARELAAIFGSYGMDVWGQGTTVTVSS

SEQ ID NO: 18573 - protein, 127 aa, Artificial Sequence
  Synthetic polypeptide representing artificial human antibody VH domain
EVQLLESGGGLVQPGGSLRLSCAGSGFTYSSHALNWVRQAPGRGLEWVSRVSGSGGGKSYADSVKGRFTISRDNPTMTLYLQMNNLRVEDTAVYFCAKERAYYYDSGGYRSHGLDVWGQGTTVVVSS

SEQ ID NO: 18574 - protein, 119 aa, Artificial Sequence
  Synthetic polypeptide representing artificial human antibody VH domain
QVQLQQWGAGLLKPSETLSLTCAVYGGSFSGYYWSWIRQPPGKGLEWIGEINHSGSTNYNPSLKSRVTISVDTSKNQFSLKLSSVTAADTAVYYCARGWSSLLYGMDVWGQGTTVTVSS

SEQ ID NO: 18575 - protein, 122 aa, Artificial Sequence
  Synthetic polypeptide representing artificial human antibody VH domain
QVQLVQSGPEVKKPGASVKVSCKASGYTFTSFDINWVRQATGQGLEWMGWMNPNSGNTGCAQKFQGRVTMTRNTSISTAYMELSSLRSEDTAMYYCARGPTWSGGPYYFDYWAQGTLVTVSS

SEQ ID NO: 18576 - protein, 127 aa, Artificial Sequence
  Synthetic polypeptide representing artificial human antibody VH domain
QLQLQESGPGLVKPSETLSLTCTVSGGSISSRSYYWGWIRQPPGKGLEWIGSIFYSGSTYYNPSLKSRVTISVDTSKNQFSLKLSSVTAADTAVYYCARQRIYCSGGSCYSNWFDPWGQGTLVTVSS

SEQ ID NO: 18577 - protein, 128 aa, Artificial Sequence
  Synthetic polypeptide representing artificial human antibody VH domain
EVQVLESGGGLGQPGGSLRLSCTASEFTFANSAMTWVRQAPGRGLEWVSSISGNGGNINYASSVRGRFFISRDNSKNTLYLQLTSLRADDTAKYYCAKLMNLGTIHPDGYYFYALDVWGQGTAVTVSS

SEQ ID NO: 18578 - protein, 125 aa, Artificial Sequence
  Synthetic polypeptide representing artificial human antibody VH domain
QVQLVESGGGVVQPGRSLRLSCAASGFSFNNYAMHWVRQAPGKGLEWVALISYEGSIKYYADSVKGRFTVSRDNFKSTVNLEMSSLRPDDTAIYYCAKTTAIFHISVAGRALDYWGRGTLVTVSS

SEQ ID NO: 18579 - protein, 118 aa, Artificial Sequence
  Synthetic polypeptide representing artificial human antibody VH domain
QVQLQESGPGLVKPSETLSLTCIVSGGSFSSYYWTWIRQPPGKGLEWIGYIYYSSGGTSYNPSLKSRVTISVDTSKNQFSLNLRSVTAADTAVYYCVRSGDYYNDALWGQGTLVTVSS

SEQ ID NO: 18580 - protein, 117 aa, Artificial Sequence
  Synthetic polypeptide representing artificial human antibody VH domain
EVQLVESGGGLVQPGGSLRLSCAASGFRFTGYWMSWVRQAPGKGLEWVANVKTDGSDKYYVESVKGRFTISRDNAKNSVYLQMNSLRGEDTAVYYCARDGGYSADYWGQGTLVTVSS

SEQ ID NO: 18581 - protein, 129 aa, Artificial Sequence
  Synthetic polypeptide representing artificial human antibody VH domain
QLQLQESGPGLVKPSETLSLTCTVSGGSISSSSYYWGWIRQPPGKGLEWIGSIYYSGSTYYNPSLKSRVTISVDTSKNQFSLKLSSVTAADTAVYYCARQGVYFDWLLSPIPGPGMDVWGQGTTVTVSS

SEQ ID NO: 18582 - protein, 120 aa, Artificial Sequence
  Synthetic polypeptide representing artificial human antibody VH domain
QVQLVESGGGVVQPGRSLRLSCAASGFTFSSYGMHWVRQAPGKGLEWVAVISYDGSNKYYADSVKGRFTISRDNSKNTLYLQMNSLRAEDTAVYYCARTGSGNYIPLDYWGQGTLVTVSS

SEQ ID NO: 18583 - protein, 122 aa, Artificial Sequence
  Synthetic polypeptide representing artificial human antibody VH domain
QVQLVQSGAEVKKPGASVKVSCKASGYTFTGYHLHWVRQAPGQGLEWMGWINPNSGGTNYAQKFQGRVTMTRDTSISTAHLELSRLRSDDTAFYYCARNGGSGSYLNWFDPWGQGTLVTVSS

SEQ ID NO: 18584 - protein, 128 aa, Artificial Sequence
  Synthetic polypeptide representing artificial human antibody VH domain
QVQLVESGGGVVQPGRSLRLSCAASGFTFSSYGMHWVRQAPGKGLEWVAVISYDGSNKNYADSVKGRFSISRDNSKNTLYLQMNSLRAEDTAVYYCAKDQIRGYSSGWTYYYYGMDVWGQGTTVTVSS

SEQ ID NO: 18585 - protein, 127 aa, Artificial Sequence
  Synthetic polypeptide representing artificial human antibody VH domain
EVHLVESGGGLVKPGGSLRLSCAASGFTFSSYSINWVRQAPGKGLEWVSSISSRSSYIYYADSVKGRFTISRDNAKNSLYLQMNSLRAEDTAVYYCARERRITYDFWSTYPDAFDIWGQGTMVTVSS

SEQ ID NO: 18586 - protein, 119 aa, Artificial Sequence
  Synthetic polypeptide representing artificial human antibody VH domain
QVHLVESGGTLVHSGGSLRLSCDASGFIFSDYYMIWIRQTPGRGLEWISYIGSASRHIYYADSVKGRFTVSRDNTKQSMDLQMDNLRVDDTAVYFCARNSGFGDGLDVWGQGTTVTVSS

SEQ ID NO: 18587 - protein, 116 aa, Artificial Sequence
  Synthetic polypeptide representing artificial human antibody VH domain
QVQLVESGGGVVQPGRSRRLSCAASGFMFSIYAMHWVRQAPGKGLEWVASISYDGSYEFYADSMKGRFTISRDNSKKILHLQMNSLRPEDTAVYYCARETGAFDYWGQGTLLIVSA

SEQ ID NO: 18588 - protein, 125 aa, Artificial Sequence
  Synthetic polypeptide representing artificial human antibody VH domain
QVQLQESGPGLVKPSQTLSLTCTVSGGSISGGDYYWSWIRQPPGRGLEWIGYIYYSGDTYYNPSLKSRVTISVDTSKNQFSLKLTSVTAADTAVYYCARALSHYYGRGGYLCDYWGQGTLVTVSS

SEQ ID NO: 18589 - protein, 117 aa, Artificial Sequence
  Synthetic polypeptide representing artificial human antibody VH domain
EVQLVESGGGLVKPGGSLRLSCAASGFTFSNTWMSWVRQSPGKGLEWVGHIKRKVDGGSTDYAAPVKGRFTISRDDSKNTVYLQINGLKTEDTAVYYCTGNWNCDYWGQGTLITVSS

SEQ ID NO: 18590 - protein, 128 aa, Artificial Sequence
  Synthetic polypeptide representing artificial human antibody VH domain
QVQLQQWGAGLLKPSETLSLTCAVYGGSFSGYSWSWIRQPPGKGLEWIGEINHSGSTNYNPSLKSRVTISVDTSKNQFSLKLSSVTAADTAVYYCARPVGYYYGSGSYVRPRTSMDVWGQGTTVTVSS

SEQ ID NO: 18591 - protein, 129 aa, Artificial Sequence
  Synthetic polypeptide representing artificial human antibody VH domain
QVQLQQWGAGLLKPSETLSLTCAVYGGSFSGYYWSWIRQPPGKGLEWIGEINHSGSTNYNPSLKSRVTISVDTSKNQFSLKLSSVTAADTAVYYCARGAGGALAGVLVTVYYYYGVDVWGQGTTVTVSS

SEQ ID NO: 18592 - protein, 131 aa, Artificial Sequence
  Synthetic polypeptide representing artificial human antibody VH domain
QVQLQESGPGLVRPSQTLSLTCTVSGGSIISGSKYWSWIRQPAGKGLEWIGRIHTSGPTSYTASLKSRVTISVDTSVNQFSLTLTSVTVADTAIYYCARESGESYESRQLTFTEPGAFDIWGQGTVVTVSS

SEQ ID NO: 18593 - protein, 121 aa, Artificial Sequence
  Synthetic polypeptide representing artificial human antibody VH domain
QVQLIQSGAEVKNPGASVKVSCKVSGYTLSELSMHWVRQAPGKGLEWMGGFHPEDGERFYVQKFQGRVTMTEDTSTDTAYMELSSLTSEDTAVYYCATDGIYSNPGWFDPWGQGTLVTVSS

SEQ ID NO: 18594 - protein, 123 aa, Artificial Sequence
  Synthetic polypeptide representing artificial human antibody VH domain
QVQLRESGPGLVKPSETLSLTCSVSSGSVISFYWSWLRQPPGKGLELISFMYFTGTAKCNPSLKSRVTMSVDTSKNQFSLNLTSVTAADTAVYFCARAPGVPFPPAIAAFDFWGHGTLVTVSS

SEQ ID NO: 18595 - protein, 116 aa, Artificial Sequence
  Synthetic polypeptide representing artificial human antibody VH domain
EVQVVESGGDLVQPGGSLRLSCAASGFNFINYWMNWVRQAPGKGLEWVANMKPDGSEKRFVDSVKGRFIMSRDNAKNSLYLQMNSLRVEDTAVYYCVAWGGSDAYWGQGALVTVSS

SEQ ID NO: 18596 - protein, 123 aa, Artificial Sequence
  Synthetic polypeptide representing artificial human antibody VH domain
EVQLLESGGGLVQPGGSLRLSCAASGFTFSSYAMSWVRQAPGKGLEWVSAISGGGGSTYYADSVKGRFTISRDNSKNTLYLQMNSLRAEDTAVYYCAKAAIVVVVAATELDYWGQGTLVTVSS

SEQ ID NO: 18597 - protein, 123 aa, Artificial Sequence
  Synthetic polypeptide representing artificial human antibody VH domain
QVQVVESGGSVAQPGTSLRLSCAASGFTFSNYGMHWVRQAPGKGLEWVALIWFDGSHQYYGESVKGRFTISRDNSRNMVFLEMNSLRVEDSAVYFCARVGDVARTVNNWLDPWGQGTLVTVSS

SEQ ID NO: 18598 - protein, 120 aa, Artificial Sequence
  Synthetic polypeptide representing artificial human antibody VH domain
EVQLVESGGGLVKPGGSLRLSCAASGFTFSSYGMNWVRQAPGKGLEWVSSISSSSSYIYYADSVKGRFTISRDNAKNSLYLQMNSLRAEDTAVYYCARDGVLFGDLGDYWGQGTLVTVSS

SEQ ID NO: 18599 - protein, 120 aa, Artificial Sequence
  Synthetic polypeptide representing artificial human antibody VH domain
QVQLQESGPGLVKPSETLSLTCTVSGGSINGYYWNWIRQSPGKGLEWIGYIYYSGSTSYNPSLESRVTMSVVTSKNQFSLKLSSVTAADTAVYYCAGSTKSDWSWHFDLWGRGARVTVSS

SEQ ID NO: 18600 - protein, 121 aa, Artificial Sequence
  Synthetic polypeptide representing artificial human antibody VH domain
QVQLVQSGAEVKKPGASVNVSCKPSGYTFTNFFIHWVRQAPGEGLEWMGIINPGVGSTNYAQKFQGRVTMTRDTSTSTFSMELSSLRSEDTAIYFCARGGHFGGTEGFDYWGQGTLVTVSS

SEQ ID NO: 18601 - protein, 124 aa, Artificial Sequence
  Synthetic polypeptide representing artificial human antibody VH domain
QVQLQQWGAGLLKPSETLSLTCAVYGSSFSFYYWTWIRHSPGKGLEWIGEINHSGSTNYNPSLKSRVTISIDTSKNQFSLKLTSVTAADTAVYSCARGGPQYQVRLRPIFFGLWGQGTLVTVSS

SEQ ID NO: 18602 - protein, 120 aa, Artificial Sequence
  Synthetic polypeptide representing artificial human antibody VH domain
EVQLLESGGGLVQPGGSLRVSCAASGFMFSNYAMSWVRQAPGKGLEWVSIISGSITNYADSVKGRFTISKDNSKNTLYLQMNSLRAEDTAVYYCASRLGDCRGTSCPIYWGQGTLVTVSS

SEQ ID NO: 18603 - protein, 122 aa, Artificial Sequence
  Synthetic polypeptide representing artificial human antibody VH domain
QITLKESGPTLVKPTQTVTLTCSFSGFSLSNIGVGVAWIRQPPGKALEWLALIYWDDDKRYNPSLKTRLTITKDTSKDQVVLTMTNMDPVDTATYYCAHSKYYYDWSWFDPWGQGLLVTVSS

SEQ ID NO: 18604 - protein, 127 aa, Artificial Sequence
  Synthetic polypeptide representing artificial human antibody VH domain
QVQLVQSGAEVKKPGASVKVSCKASGYTFTGNYMHWVRQAPGQGLEWMGWINPNSGATNYAQKFHGRVTMTRDTSVSTAYMELRRLRSDDTAVYYCARNEDRVTILVLSRHYGMDVWGQGTTVTVSS

SEQ ID NO: 18605 - protein, 120 aa, Artificial Sequence
  Synthetic polypeptide representing artificial human antibody VH domain
QVQLVESGGGVVQPGRSLRLSCAASGFTFSSYGMHWVRQAPGKGLEWVAVISYDGSKKYYADSVKGRFTISRDNSKNTLYLQMNSLRAEDTAVYYCAKEFDYYYYGMDVWGQGTTVTVSS

SEQ ID NO: 18606 - protein, 126 aa, Artificial Sequence
  Synthetic polypeptide representing artificial human antibody VH domain
QVQLVESGGGLVKVGGSLRVSCAASGFTFSDHYMNWIRQAPGKGLEWISYVSSFGSYTNYADSVKGRFTISRDNAKNSLYLQMNSLRADDTAVYYCARSSPREYSSGLEVAWFDSWGQGTLVTVSS

SEQ ID NO: 18607 - protein, 123 aa, Artificial Sequence
  Synthetic polypeptide representing artificial human antibody VH domain
QLQLQESGPGLVKPSETLSLTCTVSGDSISSSSYYWGWVRQPPGKGLEWIGSISYSGSTYYNPSLKSRVTISVDTSKNQFSLKLSSVTAADTAVYYCARRFGDYQYGYYFDYWGQGTLVTVSS

SEQ ID NO: 18608 - protein, 130 aa, Artificial Sequence
  Synthetic polypeptide representing artificial human antibody VH domain
QLQLQESGPGLVKPSETLSLTCTVSGGSISSRSYYWGWIRQPPGKGLEWIGSIYYSGSTYYNPSLKSRVTISVDTSKNQFSLKLSSVTAADTAVYYCARRPLQGISLFGVVTYNNWFDPWGQGTLVTVSS

SEQ ID NO: 18609 - protein, 120 aa, Artificial Sequence
  Synthetic polypeptide representing artificial human antibody VH domain
QVQLVQSGAEVKKPGASVKVSCKASGYTFTSYDINWVRQATGQGLEWMGWMNPNSGNTGYAQKFQGRVTMTRNTSISTAYMELSSLRSEDTAVYYCARRIAAAGTAVGYWGQGTLVTVSS

SEQ ID NO: 18610 - protein, 117 aa, Artificial Sequence
  Synthetic polypeptide representing artificial human antibody VH domain
EVQLVESGGGVVQPGGSLRLSCAASGFTFDDYAMHWVRQAPGKGLEWVSLISGDGGSTYYADSVKGRFTISRDNSKNSLYLQMNSLRTEDTALYYCAVGEWELLDYWGQGTLVTVSS

SEQ ID NO: 18611 - protein, 118 aa, Artificial Sequence
  Synthetic polypeptide representing artificial human antibody VH domain
QVQLVESGGGVVQPGRSLRLSCAASGFTFNTSGMHWVRQAPGKGLEWVAVMWSDVNNKYYADSVKGRFTISRDNSKNTLYLQMNSLRAEDTAVYYCARDYDSSSLDYWGQGTLVTVSS

SEQ ID NO: 18612 - protein, 125 aa, Artificial Sequence
  Synthetic polypeptide representing artificial human antibody VH domain
QVQLVESGGGVVQPGRSLRLSCAASGFTFSSYGMHWVRQAPGKGLEWVAVISYDGSNKYYADSVKGRFTISRDNSKNTLYLQMNSLRAEDTAVYYCAKEGGGYSYGSDGETGAVWGQGTTVTVSS

SEQ ID NO: 18613 - protein, 128 aa, Artificial Sequence
  Synthetic polypeptide representing artificial human antibody VH domain
QVRLQESGPGLVKPSQTLSLTCSVSGASINTGPYYWNWIRQPAGGGLQWIGRTYTTGSTKYNPSLNSRVTISLDTSKNQFSLRLTSVTAADTGVYFCAREGDDGDFERGFFYYAMDVWGPGTTVTVSS

SEQ ID NO: 18614 - protein, 128 aa, Artificial Sequence
  Synthetic polypeptide representing artificial human antibody VH domain
EVQLVESGGGLVQPGGSLRLSCAASGFTFSSYAMHWVRQAPGKGLEYVSAISSSGGSTYYANSVKGRFTISRDNSKNTLYLQMGSLRAEDMAVYYCARRSGQQLVSKGSYYYYGMDVWGQGTTVTVSS

SEQ ID NO: 18615 - protein, 126 aa, Artificial Sequence
  Synthetic polypeptide representing artificial human antibody VH domain
EVQLVESGGDLVQPGGSLRLSCAASQFTFSLYWMTWVRRAPGKGLEWVANIRPDGAVQFYVDSVKGRFTISRDNAKNSLYLQMNDLRTEDTAIYYCARENCVKPSRDYHYYGMDVWGQGTTVTVAS

SEQ ID NO: 18616 - protein, 119 aa, Artificial Sequence
  Synthetic polypeptide representing artificial human antibody VH domain
QVQLVQSGPEVKMPGSSVKVSCKASGGNPTYTFAWVRQAPGQGLQWMGRIVPIVGLANYAQTLKDRLTIVADKSTGTTYMQLSSLRSDDTGVYYCARGASVGDFYFDYWGQGTLVTVSS

SEQ ID NO: 18617 - protein, 129 aa, Artificial Sequence
  Synthetic polypeptide representing artificial human antibody VH domain
QVQLVESGGGVVQPGRSLRISCSGFGFTFNNYAMHWVRQAPGKGLEWVATITHDGGVQYYADSVRGRFTISRDNSKNTLYLQMRSLRVEDSAIYYCAKDHQYLYSATWYRGSALGFDSRSQGTLVTVSS

SEQ ID NO: 18618 - protein, 118 aa, Artificial Sequence
  Synthetic polypeptide representing artificial human antibody VH domain
EVLLVESGGGLVQPGGSLRLSCVASGFNFKDSWMTWVRLAPGKGLEWVADMNQDGSVRSYVDSVRGRFSISRDNAENSFFLQMNSLRVEDTAVYYCARDPAFGALDFWGQGTLVTVSS

SEQ ID NO: 18619 - protein, 120 aa, Artificial Sequence
  Synthetic polypeptide representing artificial human antibody VH domain
QVQLVQSGAEVKKPGASVKVSCRASGYTFAAYYIHWVRQAPGQGLEWMGWMNPNNGGTNYAPKFQGRVTMTRDTSISTAYMELSRLTSDDTAVYYCARALIGERVAFAPWGQGTLVPVSS

SEQ ID NO: 18620 - protein, 118 aa, Artificial Sequence
  Synthetic polypeptide representing artificial human antibody VH domain
QVQLVASGGGLVKVGGSLRLSCAASGFTFSDYYMTWIRQAPGKGLEWISYVSRGGDYTNYTDSVKGRFTISRDNAKNSLFLQMNSLRAEDTAVYYCVRDGGRGLFDCWGQGTLVTVSS

SEQ ID NO: 18621 - protein, 124 aa, Artificial Sequence
  Synthetic polypeptide representing artificial human antibody VH domain
QVQLVESGGGVVQPGRSLRLSCAASGFTFGNYGMHWVRQAPGKGPEWLTVISYDGSRTWYADSVKGRLTVSRDNSKNTVSLQVDSLGPEDTGVYYCAKDVNGLRDGNQYAADHWGQGTLVTVSS

SEQ ID NO: 18622 - protein, 125 aa, Artificial Sequence
  Synthetic polypeptide representing artificial human antibody VH domain
QVQLQESGPGLVKPSETLSLTCTVSGDSASNHNYFWTWLRQPPGKGLEWIGYRTYTGNIHKNPSLQSRVTISIDTSKNQFSLKVTSVTAADTAIYYCARGSNYYDTSGEDYLDPWGQGILVSVSA

SEQ ID NO: 18623 - protein, 116 aa, Artificial Sequence
  Synthetic polypeptide representing artificial human antibody VH domain
QVQLLESGPGLLKPSETLSLTCNVSGASIDSYYWSWIRQSPGKGLEWIGYIYYRGGTSYNPSLKSRVLISLGASRDHFSLRLSSVTAADTAVYYCARHPNTAIDFWGQGILVTVSS

SEQ ID NO: 18624 - protein, 119 aa, Artificial Sequence
  Synthetic polypeptide representing artificial human antibody VH domain
QVQLQESGPGLVRPSETLSLTCVVSGGSMDSHNWWSWVRQSPEKGLEWIGEIYQSGRTTYNPSLQSRVTISGDTSKNLFSLKLSSVTAADTAVYYCARVVPVGWYCDLWGRGTLVTVSS

SEQ ID NO: 18625 - protein, 120 aa, Artificial Sequence
  Synthetic polypeptide representing artificial human antibody VH domain
EVQLVESGGGLVQPGGSLRLSCGASGFTFSSYWMHWVRQAPGKGLVWVSRINSDGRTTSYADSVKGRFTISRDNAKNTLYLQMNSLRAEDTAVYYCAKTGLPGPLAFDIWGQGTMVTVSS

SEQ ID NO: 18626 - protein, 118 aa, Artificial Sequence
  Synthetic polypeptide representing artificial human antibody VH domain
QVQLQESGPGVVKPSETLSLTCTVSSFSISSGYYWAWIRQPPGKGMEWIGSIFHNGNTYYNPSLKSRVTISVDTSKNQFSLKLTSVTAADTAIYYCARDYYYDSSGYWGQGTLVTVSS

SEQ ID NO: 18627 - protein, 122 aa, Artificial Sequence
  Synthetic polypeptide representing artificial human antibody VH domain
EVQLLESGGDLVQPGGSLRLSCAASGFTFGSFAMNWVRQAPGKGLEWVSGISGSGGSTHYADSVKGRFTISRDNSRNTVYLQMNSLRADDTALYYCAKGSSGWYQSYYFDYWGQGTLVTVSS

SEQ ID NO: 18628 - protein, 124 aa, Artificial Sequence
  Synthetic polypeptide representing artificial human antibody VH domain
QLQLQESGPGLVKPSETLSLTCTVSGGSISSSSYYWGWIRQPPGKGLEWIGSIYYSGSTYYNPSLKSRVTISVDTSKNQFSLKLSSVTAADTAVYYCARGAPRVWQWLDYFDYWGQGTLVTVSS

SEQ ID NO: 18629 - protein, 121 aa, Artificial Sequence
  Synthetic polypeptide representing artificial human antibody VH domain
EVQMLESGGGLVQPGGSLRLSCAASGFTYSTYAMTWVRQAPGKGLEWVSTLDRTGSLTFYADSVKGRFTVSRDNSKNTMYLQMNSLRAEDTAIYYCAKTPSGNYEAYYQNWGQGTLVTVSS

SEQ ID NO: 18630 - protein, 117 aa, Artificial Sequence
  Synthetic polypeptide representing artificial human antibody VH domain
EVQLVESGGGLVQPGGSLRLSCAASGFTFSTSWMHWVRQAPGKGLVWVSRLKSDGSSTNYADSVKGRFTISRDNAKNTLYLQMNSLRVEDTAVYYCASLQGSAPRAWGQGTLVTVSS

SEQ ID NO: 18631 - protein, 127 aa, Artificial Sequence
  Synthetic polypeptide representing artificial human antibody VH domain
QLLLQESGPGLVKPSETLSLNCSVSGDSITTTGFFWGWIRQVPGVGLEWLGSVYYTGSTYYNPTLKSRLVISVDTSNNQFSLSLTSVTAADAGFYYCARRSSIGLKTNGRLRVFDTWGRGTRVTVSS

SEQ ID NO: 18632 - protein, 117 aa, Artificial Sequence
  Synthetic polypeptide representing artificial human antibody VH domain
QVQLVQSGAEVKNLGASVKVSCKASGFTFTSFSIHWLRQAPGQGLEWMGWINVGTGETKFSQSSQGRVTFSTDTSASTAYMELRSLKSEDTAVYFCARVSFGDYAVWGQGTQVTVSS

SEQ ID NO: 18633 - protein, 122 aa, Artificial Sequence
  Synthetic polypeptide representing artificial human antibody VH domain
EVQLLESGGGLAQPGGSLRLSCAGSGFSFGRYGMGWIRQAPGKGLEWVCVISSISDTSQCAESVSGRFIVSRDNSRNTLFLEMNSLRAEDTATYYCVKDDDASTDWYAADSWGQGTLVVVSS

SEQ ID NO: 18634 - protein, 119 aa, Artificial Sequence
  Synthetic polypeptide representing artificial human antibody VH domain
QVQLVQSGAEVKKPGASVEVSCKASGYTFTSYGINWVRQAPGQGLEWMGWISAFNGNTIYAQKFQGSVTMTTDTSTSTAYLALRSLRSDDTAVYYCARGASPRSRTDYWGQGTLVTVSS

SEQ ID NO: 18635 - protein, 122 aa, Artificial Sequence
  Synthetic polypeptide representing artificial human antibody VH domain
EVQLLESGGGLVQPGGSLRLSCAASGFTFNNFAMNWVRQSPGKGLEWVSGISGSGGDSQYADSVKGRFAISRDNSKKTLYLQMSSLRAEDTAVYYCAKGSSGWYMSYYFDYWGRGTLVTVSS

SEQ ID NO: 18636 - protein, 126 aa, Artificial Sequence
  Synthetic polypeptide representing artificial human antibody VH domain
QLQLQESGPGLVKPSETLSLSCTVSGDSLSSTSYSWAWIRQPPGKGLEWIGTMYYRGSTSYIPSLKGRVSISVDTSKNQFSLKLYSVTAADTALYYCARGGAPYSVGWDDNWFDPWGQGTLVSVSS

SEQ ID NO: 18637 - protein, 122 aa, Artificial Sequence
  Synthetic polypeptide representing artificial human antibody VH domain
EVQLLESGGGLVQPGGSLRLSCAASGFTFSTYAMNWVRQAPGKGLEWVSGISGSSGSTQNADSVKGRFSISRDNSKNMLYLQMNSLRAEDTAVYYCAKGSSGWYRNYYFDYWGQGTLVTVSS

SEQ ID NO: 18638 - protein, 122 aa, Artificial Sequence
  Synthetic polypeptide representing artificial human antibody VH domain
EVQVVQSGAEVKKPGESLKISCKASGYSFTNHWIGWVRQMPGKGLEWLGIIHPSDSETTYSPSFQGRVTISVDKSISAAYLQWSGLEASDSAIYYCARRGGGGYPYYYFDLWGRGTPVTVSS

SEQ ID NO: 18639 - protein, 122 aa, Artificial Sequence
  Synthetic polypeptide representing artificial human antibody VH domain
EVHLLESGGGVVQPGGSLRLSCAASGFTFNNYAMNWVRRAPGKGLEWVSGISGSGGDTAYPDSVKGRFTISRDNSKNTLSLQMNSLRDEDTAVYYCARGSSGWYSAYYFDYWGQGTLVTVSS

SEQ ID NO: 18640 - protein, 119 aa, Artificial Sequence
  Synthetic polypeptide representing artificial human antibody VH domain
EVQLVESGGGLVKPGGSLRLSCSASGFTFFTYTMNWVRQAPGEGLEWVSSITSGSTYLHYADSVKARFTISRDNAKSSLYLQMNSLSAEDTAVYYCVRGASGIGVTRYWGQGTLVTVSS

SEQ ID NO: 18641 - protein, 121 aa, Artificial Sequence
  Synthetic polypeptide representing artificial human antibody VH domain
EVQLLESGGGLVQPGGSLRLSCAASGFTFKNYAMSWVRQAPGKGLEWVSAISGSGGSTYYADSVKGRFTISRDNSKNTLYLQMNSLRAEDTAVYYCAKSPVSGYYNYFDYWGQGTLVTVSS

SEQ ID NO: 18642 - protein, 129 aa, Artificial Sequence
  Synthetic polypeptide representing artificial human antibody VH domain
EVQLVESGGGLVQPGGSLRLSCAASGFTVSSSYMTWVRQAPGKGLECVSVIYGGGSTYYADSVKGRFTISRHFSKNTVYLQMNSLGAGDTAVYYCARWEREYRVFEYNKTPIGWYFDLWGRGTLVTVSS

SEQ ID NO: 18643 - protein, 136 aa, Artificial Sequence
  Synthetic polypeptide representing artificial human antibody VH domain
QVQLVQSGTEVKKPGASVTVSCKASGYTFTNYDINWVRQATGQGLEWMGWMNPSSGNRGYAQKFQGRVTMTRNTSTNTAYMELSSLRSEDAAVYYCARGGTPTSYYDILTGHYPAPPDFYYGMDVWGQGTTVTVSS

SEQ ID NO: 18644 - protein, 123 aa, Artificial Sequence
  Synthetic polypeptide representing artificial human antibody VH domain
EVQLVQSGAEVKKPGESLRISCKGSGYSFTSYWISWVRQMPGKGLEWMGRIDPSDSYTNYSPSFQGHVTISADKSISTAYLQWSSLKASDTAMYYCARLSLDYYDSSGYHDYWGQGTLVTVSS

SEQ ID NO: 18645 - protein, 119 aa, Artificial Sequence
  Synthetic polypeptide representing artificial human antibody VH domain
EVQLLESGGGLVQPGGSLRLSCAASGFTFNNYAMTWIRQAPGKGLEWVSSVTNTGSTYYAGSAKGRFTISRDNSNNTVFLHMNSLRAEDTAIYYCAKDQALWFDTFDHWGQGALVTVSS

SEQ ID NO: 18646 - protein, 117 aa, Artificial Sequence
  Synthetic polypeptide representing artificial human antibody VH domain
EVQVVESGGGLVQPGGSLRLSCAASGFSFSNYWMSWIRQAPGKGLEWVATIKEDGSDKYYVDSVKGRFTISKDNAQNTLSLQMNSLRAEDTAVYFCTRGGGWTTEYWGQGTLVTVSS

SEQ ID NO: 18647 - protein, 120 aa, Artificial Sequence
  Synthetic polypeptide representing artificial human antibody VH domain
QVQLVESGGGVVQPGRSLRLSCAASGFIFSDYAMHWVRQAPGKGLEWVAIIRNDGSDNNYADSVKGRFAISRDNSKNTAYMEMNSLRVEDTAVYYCAKATNVYGFYFDFWGQGAQVTVSS

SEQ ID NO: 18648 - protein, 117 aa, Artificial Sequence
  Synthetic polypeptide representing artificial human antibody VH domain
EVQLVESGGGLVQPGGSLRLSCATSGFRFSDSSMNWVRQAPGKGLEWVSHIWISSSTTHYADSVKGRFSVSTDNAKNSLYLQMNSLRAEDTAVYYCVGDRAYAFDIWGQGTMVTVSS

SEQ ID NO: 18649 - protein, 119 aa, Artificial Sequence
  Synthetic polypeptide representing artificial human antibody VH domain
EVQLVESGGGLVQPGGSLRLSCAASGFTFSTNHLYWVRQAPGKGLEWVSVIYNDGGTSYADSVQGRFAISRDNSRSTLYLQMNSLRPEDTAVYYCSRVEAAPNNWFDPWGQGTRVTVSS

SEQ ID NO: 18650 - protein, 122 aa, Artificial Sequence
  Synthetic polypeptide representing artificial human antibody VH domain
EVQLLASGGGLLQPGGSLRLSCAASGFTFSNYAMSWVRQAPETGLEWVSGVSGSGGSTHYADSVKGRFTISRDNSKNTLYLQMSSLRADDTAVYYCAKGSSGWYQSHVFDMWGPGTMVTVSS

SEQ ID NO: 18651 - protein, 120 aa, Artificial Sequence
  Synthetic polypeptide representing artificial human antibody VH domain
EVQLVESGGGLVQPGGSLKLSCAASGFTFSGSAMHWVRQASGKGLEWVGRIRSKANSYATAYAASVKGRFTISRDDSKNTAYLQMNSLKTEDTAVYYCTRGLADWYFDLWGRGTLVTVSS

SEQ ID NO: 18652 - protein, 124 aa, Artificial Sequence
  Synthetic polypeptide representing artificial human antibody VH domain
QVHLQESGPGVVKPSQTLSLTCTVSGVSVTSIGYYWGWVRQHPGMGLEWIGHTFYTGNTYYNPSLKSRLSISLDEPKNQFSLRLNSVTAGDTAVYFCARVVNANYPPNNYFDAWGQGSLVTVSS

SEQ ID NO: 18653 - protein, 120 aa, Artificial Sequence
  Synthetic polypeptide representing artificial human antibody VH domain
QVQLQESGPGLVKPSQTLSLTCTVSGASVSSVDSHWSWIRQPPGRGLEWLGYISYTAGTSYSPTLKSRVTISADPSKNQVSLSLTSMTAADTALYYCVRARTGTSAFDIWGQGTMVTVSS

SEQ ID NO: 18654 - protein, 118 aa, Artificial Sequence
  Synthetic polypeptide representing artificial human antibody VH domain
EVQLVESGGGLVKPGGSLRLSCSASGFTFTTYPMNWVRQAPGKGLEWISNIRTTRESGTYYADSVRGRFTISRDDAKNSVSLHMNNLRAEDTAIYYCVRDYAYAFDVWGQGAMVTVSS

SEQ ID NO: 18655 - protein, 119 aa, Artificial Sequence
  Synthetic polypeptide representing artificial human antibody VH domain
EVQLVESGGRFVKPGGSLRLSCAASGFSVSSAWMSWVRQAPGKGLEWVGRIKKKSDGSTIDYAAPVRGRFTISRDDSKNILYLQMNGLRIDDTAVYYCMTHQGSPHPEGAQGTLVTVSS

SEQ ID NO: 18656 - protein, 119 aa, Artificial Sequence
  Synthetic polypeptide representing artificial human antibody VH domain
QVQLQESGPGLVKPSGTLSLTCAVSGVSISSSNWWSWVRQPPGKGLEWIGEIFHSGTTNCNPSLKSRVTISLDKSKNQFSLNLSSLTAADTAVYYCARIPGYSSTMDVWGQGTTVTVSS

SEQ ID NO: 18657 - protein, 125 aa, Artificial Sequence
  Synthetic polypeptide representing artificial human antibody VH domain
EVQLVQSGGGLVQPGGSLRLSCAASGFSFNSHWMDWVRQAPGKGLEWVANIKYDGSVQYYGDSVKGRFTISRDNANNSLYLQMNSLRAEDTAVYYCARDRGYYSDGGWYTLLDYWGQGILVTVSS

SEQ ID NO: 18658 - protein, 124 aa, Artificial Sequence
  Synthetic polypeptide representing artificial human antibody VH domain
EVQLVQSGAEVKRPGESLKISCEGSGYRFTSFWIGWVRQVPGKGLEWIGIIYPSDSDTRYNPSFQGQVTISADKSNSSAYLQWGRLKASDSGIYYCVRRNYDVFTGSYLGFDPWGQGTLVTVSS

SEQ ID NO: 18659 - protein, 120 aa, Artificial Sequence
  Synthetic polypeptide representing artificial human antibody VH domain
QVQLVQSGAEVKKPGASVKVSCKTSGYSFTGHLIHWVRQAPGQGFEWMGWIDPRSDATRYGQRFQGRITMTRDTSISTVHMELTGLKSDDMAIYYCVREFRSGTYYSDYWGQGTLVTVSS

SEQ ID NO: 18660 - protein, 119 aa, Artificial Sequence
  Synthetic polypeptide representing artificial human antibody VH domain
QVQLVQSEAEVKKPGASVKVSCEASGYTFTSYGINWVRQAPGQGLEWMGWISAYNGNTHYAQKFQDRVTLTTVTSARAAYMELRSLRSDDTAVYYCARGASPRSRTDYWGQGTLVTVSS

SEQ ID NO: 18661 - protein, 124 aa, Artificial Sequence
  Synthetic polypeptide representing artificial human antibody VH domain
EVQLVESGGGLVKPGGSLRLSCAASGFIFSKYAMNWVRQAPGKGLEWVCSISYSSNQIYCADSVKGRFTVSRDNAENSLYLQMNSLRAEDTAVYYCAREGIWYNSGWDEYFQLWGQGTLVTVSS

SEQ ID NO: 18662 - protein, 113 aa, Artificial Sequence
  Synthetic polypeptide representing artificial human antibody VH domain
EVQLVETGGGLVQPGGSLRLSCSASGFTFSTNTMHWVRQAPGKGLEYVSAISSSGGTTLYTDSVKGRFTVSRDNSKNTLYLQMSSLRPEDTAVYYCLRPYDYWGQGTLVTVSS

SEQ ID NO: 18663 - protein, 120 aa, Artificial Sequence
  Synthetic polypeptide representing artificial human antibody VH domain
QVQLQESGPGLVKPSGTLSLTCAVSGGSITSTYWWSWVRQPPGKGLEWIGEIYHSGSTNYNPSLKSRVTISADKSKNQFSLKLTSVTAADTAVYYCARGVVRNKNWFDPWGQGTLVTVSS

SEQ ID NO: 18664 - protein, 124 aa, Artificial Sequence
  Synthetic polypeptide representing artificial human antibody VH domain
QVQLVESGGGVVQPGGSLRLSCAASGFTFSSYAMHWVRQAPGKGLEWVAVTSYDGTIKYYADSVRGRFAISRDNSESTVLTLFLQMNSLRTEDTAVYYCARTDGGNYMAYFDYWGQGSLVTVSS

SEQ ID NO: 18665 - protein, 118 aa, Artificial Sequence
  Synthetic polypeptide representing artificial human antibody VH domain
EVQLLESGGGLVQPGGSLKLSCAASGFTFSSYAMSWVRQAPGKGLEWVSTISPSAVSTYFADSVKGRFTISRDNSKNTLYLQMNSLRAEDTAVYYCARYLSRREFDCWGQGTLVTVSS

SEQ ID NO: 18666 - protein, 123 aa, Artificial Sequence
  Synthetic polypeptide representing artificial human antibody VH domain
EVQLVQSGAEVKKPGESLRISCKGSGYTFTTYWISWVRQMPGKGLEWMGNIDPNDSKTNYSPSFQGHVSISADKSITTAYLQWSSLKASDTAIYYCARHLTGSKSTHDWFDPWGQGTLVTVSS

SEQ ID NO: 18667 - protein, 122 aa, Artificial Sequence
  Synthetic polypeptide representing artificial human antibody VH domain
QLQLQESGSGLVQPSQTLSLTCAVSGGSISSSGYSWSWVRQAPGKGLEWIGYIYNSGNTRYNPSLESRVTLSEDTSKNQFSLKMTSVTAADTAVYYCTRESIAPYSFYMDVWGKGTTVTVSS

SEQ ID NO: 18668 - protein, 122 aa, Artificial Sequence
  Synthetic polypeptide representing artificial human antibody VH domain
EVQLVESGGGLVEPGGSLRLSCEASGFTLGNAWMSWVRQAPGKGLEWIARIKREDDGGTIDYTAPVKDRFTVSRDDSTNTLFLQMNNLKVEDTAVYSCTTRSSSWSASFDHWGQGTLVTVSS

SEQ ID NO: 18669 - protein, 119 aa, Artificial Sequence
  Synthetic polypeptide representing artificial human antibody VH domain
QVQLVQSGAEVKKPGSSVKVSCTASGDTLRNYAISWIRQAPGQGLEWMGGNIPMYGTGNYAQKFKGRVTISADDSTRTVYMELRSLRPEDTAVYYCARGPTVTGWFDPWGQGTLVTVSS

SEQ ID NO: 18670 - protein, 133 aa, Artificial Sequence
  Synthetic polypeptide representing artificial human antibody VH domain
QLQLQESGPGLVKPSETLSLTCTVSGGSISSRSYYWGWIRQPPGKGLEWIGSIYYSGSTYYNPSLKSRVTISVDTSKNQFSLKLSSVTAADTAVYYCARGALVGTTFSWGPKTPGRTSWFDPWGQGTLVTVSS

SEQ ID NO: 18671 - protein, 122 aa, Artificial Sequence
  Synthetic polypeptide representing artificial human antibody VH domain
EVQLVESGGGLVQPGGSLRLSCEASGFTFSDFEMNWVRQAPGKGLDWVSYFSRDGTVYYSDSVKGRFTISRDNAKNSLYLQMNSLRAEDTAIYYCARVPPTTSGWDHYFDHWGQGALVSVSS

SEQ ID NO: 18672 - protein, 121 aa, Artificial Sequence
  Synthetic polypeptide representing artificial human antibody VH domain
QVTLRESGPALVKPTQTLTLTCTVSGFSLDTPKMSVNWIRQPPGGALEWLARIDWDNEKFYGSSLQTRLAVYKDTSRNQVVLTVSHVGPGDTGTYFCARKTTSMDYYTEVWGQGTLVTVSP

SEQ ID NO: 18673 - protein, 128 aa, Artificial Sequence
  Synthetic polypeptide representing artificial human antibody VH domain
QVQLVQSGAEVKKPGSSVKVSCKASGGTFSSYAISWVRQAPGQGLEWMGGIIPIFGTANYAQKFQGRVTITADESTSTAYMELSSLRSEDTAVYYCASKYYDILTGHQVVYYYGMDVWGQGTTVTVSS

SEQ ID NO: 18674 - protein, 121 aa, Artificial Sequence
  Synthetic polypeptide representing artificial human antibody VH domain
QVQLVESGGGVVQPGRSLRLSCAASGFTFSKYGMHWVRQAPGKGLEWVAFIWYDGSNKSYADSMRGRFTISRDNSRDTLYLQMNSLRADDTAVYYCAREVEGSSADWFDPWGQGTLVTVSS

SEQ ID NO: 18675 - protein, 124 aa, Artificial Sequence
  Synthetic polypeptide representing artificial human antibody VH domain
EVRLVESGGGVVQPGGSVRLSCAASGFTFDNYAIHWVRLPPGKGLEWVSLIGGGGDDKLYGASVRGRFTISRDNFKNSVYLQMDSLRTDDTALYYCAKDLDGSATWNLDAFDIWGRGTMVTVSS

SEQ ID NO: 18676 - protein, 114 aa, Artificial Sequence
  Synthetic polypeptide representing artificial human antibody VH domain
EVQLVESGGGLVQPGRSLRLSCTASGFTFGDYAMSWVRQAPGKGLEWVGFIRSKAYGGTTEYAASVKGRFTISRDDSKSIAYLQMNSLKTEDTAVYYCTRSDYWGQGTLVTVSS

SEQ ID NO: 18677 - protein, 122 aa, Artificial Sequence
  Synthetic polypeptide representing artificial human antibody VH domain
EVQLVESGGDLVQPGGSLRLACAVSGFTVSSNYMSWVRQAPGKGLEWVSVLYSDGSTFYTDSVKGRFVISRDNSTNMLFLQMNSLRVEDTALYYCARDYYANGEYETIFEYWGQGTPVTVST

SEQ ID NO: 18678 - protein, 122 aa, Artificial Sequence
  Synthetic polypeptide representing artificial human antibody VH domain
EVHLVESGGDLVQSGGSLRLACAVSGVSVSANYMSWVRQTPGKGLEWVSVIYSDGSTYYTDSVKGRFIISRDNSQNTLFLQMNSLRAEDTALYYCARDYYANGDYETIFEYWGQGTPVTVSS

SEQ ID NO: 18679 - protein, 123 aa, Artificial Sequence
  Synthetic polypeptide representing artificial human antibody VH domain
EVQLVQSGAEVKKPGESLKISCHGSGYRFHTYCIGWVRQMPGKGLEWMGIICPGTSDPKFSPSFRGRISISMDVSVTTAFLQWSSLEASDTAIYYCARAKFDVDGFTPFFDSWGQGALVTVSS

SEQ ID NO: 18680 - protein, 119 aa, Artificial Sequence
  Synthetic polypeptide representing artificial human antibody VH domain
EVQLLESGGGLVQPGGSLRLSCAASGFSFSIYGVTWVRQAPGKGLEWVSSIDGVTGHLHYADSVKGRFTISRDNSRNTFFLQINSVRAEDTAVYFCARASIWGNYFDYWGPGTLVTVSS

SEQ ID NO: 18681 - protein, 123 aa, Artificial Sequence
  Synthetic polypeptide representing artificial human antibody VH domain
EVQLLESGGGLVQRGGSLRLSCSASKFTFSDYAMSWVRQAPGKGLEWVSAVSGNGDNTYYADSVKGRFTISRDNSKNTLYLQMDSLTPDDTAMYYCAKQGYSGAWPEVAFDLWGQGTMVTVSS

SEQ ID NO: 18682 - protein, 120 aa, Artificial Sequence
  Synthetic polypeptide representing artificial human antibody VH domain
EVQLVESGGGLVKPGGSLRLSCAASGFTFSSYSMNWVRQAPGKGLEWVSSISSTSIYIYYADSVKGRFTISRDNAKNSLYLQMNSLRAEDTAVYYCATSGSWFRQPFDYWGQGTLVTVSS

SEQ ID NO: 18683 - protein, 135 aa, Artificial Sequence
  Synthetic polypeptide representing artificial human antibody VH domain
QVQLQESGPGLVKPSQTLSLTCTVSGGSISSGGYYWSWIRQHPGKGLEWIGYIYYSGSTYYNPSLKSRVTISVDTSKNQFSLKLSSVTAADTAVYYCASVKGRLEHPRGFCSGGSCYSDWRFDPWGQGTLVTVSS

SEQ ID NO: 18684 - protein, 123 aa, Artificial Sequence
  Synthetic polypeptide representing artificial human antibody VH domain
EVQLVESGGGLIQPGGSLRLSCVASGFTFSAHAMTWVRQAPGKGLEWVSVFTGSSAGTTSYADSVKGRFTISRDISRNTLFLEMNSLRVEDTAVYYCARDESLTGFRGTLDSWGQGTQVTVSS

SEQ ID NO: 18685 - protein, 126 aa, Artificial Sequence
  Synthetic polypeptide representing artificial human antibody VH domain
EVKLVQSGGGLVQPGGSLTMSCESSGFTFSNFYMTWVRQAPGSGPEWVAHIKGDGSDSYYADSVKGRFFVSRDNVKNSLYLQMNSLTAEDTAVYYCARVDATVHCAGGRCAYFDYWGQGSLLTVSS

SEQ ID NO: 18686 - protein, 122 aa, Artificial Sequence
  Synthetic polypeptide representing artificial human antibody VH domain
EVRLVESGGGLVQPGGSLRLSCEASGITVSLNYMSWVRQAPGRGLEWLSVMYSDGSTYYTDSVKGRFTISRDTSKDTLYLQMNSLTVEDSGLYYCARDYYVSGDYETIFQHWGQGALVTVSS

SEQ ID NO: 18687 - protein, 124 aa, Artificial Sequence
  Synthetic polypeptide representing artificial human antibody VH domain
EVLLLESGGGLVQPGRSLRLSCAASGFTFSNYAMTWVRQAPGKGLECVSGISGGGDRTHYADSVRGRFTISRDNSKNMLYLQMNSLRAEDTAVYYCAKVPSSSWYSGSRWFDPWGQGALVTVSS

SEQ ID NO: 18688 - protein, 121 aa, Artificial Sequence
  Synthetic polypeptide representing artificial human antibody VH domain
EVHLVESGGGWVQPGGSLRLSCSASGFTFNDYAMQWVRQAPGKGLEFVSAISHTGHETYYTDSGKGRFTISRDNSKNMVYLQMSSLRTEDTAMYYCVKDRFYYGSEQTDSWGQGTLVTVSS

SEQ ID NO: 18689 - protein, 133 aa, Artificial Sequence
  Synthetic polypeptide representing artificial human antibody VH domain
QVQLQESGPGLVKPSQTLSLTCTVSGGSITSDGYYWNWIRQHPGKGLEWIGYMYYTGSTDYNPSLKGRVTISVDTSKNQLSLELTSVTAADTAVYYCARDRPPSTFYSTISGSYYEPDAFDIWGQGTVVTVSS

SEQ ID NO: 18690 - protein, 125 aa, Artificial Sequence
  Synthetic polypeptide representing artificial human antibody VH domain
QVHLAQSGAEVKKPGASVKVSCKASGYTFSDYYIHWVRQAPGQGLEWMGWVNPNNGDTYYAQKFQGRVTMTWDTSISTAYMELNRLTSDDTAVYYCAREGSDIVVPGTIGWFDPWGQGTLVTVSS

SEQ ID NO: 18691 - protein, 119 aa, Artificial Sequence
  Synthetic polypeptide representing artificial human antibody VH domain
QVHLQESGPGLVKPSGTLSLTCEVSNGSVSNNNWWTWVRQAPGKGLEWIGEIYHSGTTNFNPSLKSRLYMSVDKSKNQVSLKLTSATAADTAVYYCAKAGVGGGWFDPWGQGALVTVSS

SEQ ID NO: 18692 - protein, 117 aa, Artificial Sequence
  Synthetic polypeptide representing artificial human antibody VH domain
EVQLVESGGGLVQPGGSLRLSCAASGFTFSSYDMHWVRQATGKGLEWVSAIGTAGDTYYPGSVKGRFTISRENAKNSLYLQMNSLRAGDTAVYYCARDIGGGAFDIWGQGTMVTVSS

SEQ ID NO: 18693 - protein, 122 aa, Artificial Sequence
  Synthetic polypeptide representing artificial human antibody VH domain
EVQLVESGGGLVQPGGSLRLSCAASGFTFSSYWMHWVRQAPGKGLVWVSHISDDGIITSYADSVKGRFTISRDNAKNTLYLQMNSLTVEDTAVYYCARAAGAGTGYNWFDPWGQGTLVTVSS

SEQ ID NO: 18694 - protein, 120 aa, Artificial Sequence
  Synthetic polypeptide representing artificial human antibody VH domain
EVQLVESGGGLIQPGGSLRLSCAASGFTVSSYYMTWVRQAPGKGLECVAIMYIDGRTYFADSVKGRFTLSRDDSKSTLYLQMNSLRVEDTAIYYCARDGTTGVLAAFDIWGQGTMVTVSS

SEQ ID NO: 18695 - protein, 125 aa, Artificial Sequence
  Synthetic polypeptide representing artificial human antibody VH domain
QVQLQESGPGLVKPSQTLSLTCTVSGGSISSGGYYWSWIRQHPGKGLEWIGYIYYSGSTYYNPSLKSRVTISVDTSKNQFSLKLSSVTAADTAVYYCARARVTMIVRLVNAFDIWGQGTMVTVSS

SEQ ID NO: 18696 - protein, 131 aa, Artificial Sequence
  Synthetic polypeptide representing artificial human antibody VH domain
QVQLVQSGAEVKKPGASVKVSCKASGYTFTSYGISWVRQAPGQGLEWMGWISGYNGNTNYAQKLQGRVTMTTETSTSTAYMELRSLRSDDTAVYYCARDPRLRFGELFRAPFKYYYGMDVWGQGTTVTVSS

SEQ ID NO: 18697 - protein, 125 aa, Artificial Sequence
  Synthetic polypeptide representing artificial human antibody VH domain
QVQLQESGPGLVKPSETLSLTCAVSGGSISHYYWSWIRQPPGKGLEWIGNIYYSGKTDYNPSLKSRVTISVDTSKNQFSLRLRSVTAADTAMYYCARDFDVWTDEGPDYYGMDVWGQGTTVTVSS

SEQ ID NO: 18698 - protein, 124 aa, Artificial Sequence
  Synthetic polypeptide representing artificial human antibody VH domain
QLQLQESGPGLVKPSETLSLTCTVSGGSISSSSYYWGWIRQPPGKGLEWIGSIYYSGSTYYNPSLKSRVTISVDTSKNQFSLKLSSVTAADTAVYYCARLRRRDMVRGVNFDYWGQGTLVTVSS

SEQ ID NO: 18699 - protein, 122 aa, Artificial Sequence
  Synthetic polypeptide representing artificial human antibody VH domain
QVQLVQSGAEVKKPGSSVKVSCKASGYIFNRYAINWVRRAPGQGLEWMGRIIPSAHTENYAQRFQGRVTITADKSTSTAYMELSSLRSEDAAIYYCAAGGGGYGDSYRMDVWGQGTTVTVSS

SEQ ID NO: 18700 - protein, 126 aa, Artificial Sequence
  Synthetic polypeptide representing artificial human antibody VH domain
EVQLLESGGGLVQRGGSLRLSCAASGFSFSSYAMNWVRQAPGKGLEWVSGISDSGYNTYYADSVKGRCTISRDNSENALYLQMHSLRAEDTATYYCAKVPTNDFLIGYSSDAFDIWGQGTMVTVSS

SEQ ID NO: 18701 - protein, 123 aa, Artificial Sequence
  Synthetic polypeptide representing artificial human antibody VH domain
QVRLVESGGGVVQPGRSLRLSCAASGFSFNIYAMHWVRQAPGKGLEWVAILSYDGINKYYADSVKGRFTISRDNSKDTLYLQMNGLTAEDTAVYYCAKDGDFGGSYSFYFDNWGQGTLVTVSS

SEQ ID NO: 18702 - protein, 128 aa, Artificial Sequence
  Synthetic polypeptide representing artificial human antibody VH domain
QVQLVESGGGVVQPGRSLRLSCAASGFTFSRYGMHWVRQAPGKGLEWVTLISSDGSNKYYADSVKGRLSISRDNFDNTLYLQMNSLRVEDTAVYYCARSSYGLREFGGVLPLGDFDYWGQGTLVTVSS

SEQ ID NO: 18703 - protein, 126 aa, Artificial Sequence
  Synthetic polypeptide representing artificial human antibody VH domain
QVQLVQSGAEVTKPGASVKISCKASGFTFVDYYIHWVRRVPGQGLEWMGRINPKSGGANFAQKFQDWVTMTRDTSISTVHMELRKLRSDDTAVYYCARISRVFYDLWSDGYVLDVWGQGTTVTVSS

SEQ ID NO: 18704 - protein, 133 aa, Artificial Sequence
  Synthetic polypeptide representing artificial human antibody VH domain
EVQLVESGGGLVQPGGSLRLSCAASGFTFSSYWMHWVRQAPGKGLVWVSRINSDGSSTSYADSVKGRFTISRDNAKNTLYLQMNSLRAEDTAAYYCARGSMVRGVIYARGPSDPPDYYGMDVWGQGTTVTVSS

SEQ ID NO: 18705 - protein, 123 aa, Artificial Sequence
  Synthetic polypeptide representing artificial human antibody VH domain
QVQLVQSGSELKKPGASVKVSCKASGYTFTRYAMNWVRQAPGQGLEWMGWINTNTGNPTYAQGFTGRFVFSLDTSVSTAYLQISSLKAEDTAVYYCAREYVVVSAAMGGFDPWGQGTLVTVSS

SEQ ID NO: 18706 - protein, 127 aa, Artificial Sequence
  Synthetic polypeptide representing artificial human antibody VH domain
QVHLGQSGADVKKPGASVKVSCKVSGLTLNDLSIHWVRQAPGKGLEWMGGFDLEEGVTIFAEKFQGRVTMTEDTSADTAYMDLTSLQYDDTAIYYCVAATSPTDFLAARGRTAFDVWGAGTMVIVSS

SEQ ID NO: 18707 - protein, 125 aa, Artificial Sequence
  Synthetic polypeptide representing artificial human antibody VH domain
QVQLEQSGAEVMKPGASVKVSCKASGYTFTSYDLTWVRQAPGQRPEWMGWVRPTTGDTFYAQKFQGRVTMTRNISISTVYMELSSLSPGDTAVYFCARRRVGYCKGGSCYSWVHWGQGTLVTVSS

SEQ ID NO: 18708 - protein, 125 aa, Artificial Sequence
  Synthetic polypeptide representing artificial human antibody VH domain
QVQLVESGGGVVQPGRSLRLSCAASGFTFSSYAMHWVRQAPGKGLEWVAVISYDGSNKYYADSVKGRFTISRDNSKNTLYLQMNSLRAEDTAVYYCARAPRTVVTGDYYYGMDVWGQGTTVTVSS

SEQ ID NO: 18709 - protein, 121 aa, Artificial Sequence
  Synthetic polypeptide representing artificial human antibody VH domain
EVQLVESGGGLVKPGGSLRLSCAASGFTFSYAWLSWVRQAPGKGLEWVGRIKSKTDGGTTDYAAPVKGRFTISRDDSKNTLYLQMNSLKTEDTAVYYCTTDLHDYGDSDYWGQGTLVTVSS

SEQ ID NO: 18710 - protein, 121 aa, Artificial Sequence
  Synthetic polypeptide representing artificial human antibody VH domain
EVQLLESGGGLVQSGGSLRLSCAASGFTFSNFGMSWVRLAPGQGLEWVSTIDSVGRRTYYADSVKGRFTISRDNSQNKVYLQMNSLRVDDTAVYYCTKLPFDYGAYWFDPWGQGTRVIVSS

SEQ ID NO: 18711 - protein, 127 aa, Artificial Sequence
  Synthetic polypeptide representing artificial human antibody VH domain
QVQLQESGPGLVKPSQTLSLTCSVSGDSIISDDDYWTWIRQHPLKGLEWIGYIHYGGATHYNPSLKSRLALSIDTSKNQFFLRLNSVTAADTAIYYCARIFGSGYLGLVSYHWFDPWGRGTLVTVSS

SEQ ID NO: 18712 - protein, 118 aa, Artificial Sequence
  Synthetic polypeptide representing artificial human antibody VH domain
QVQLVQSGAEVKKPGASVKVSCKASGYTFNSYYIHWVRQAPGPGLEWMGIINPGVGSTTLAQKFQGRVTMTRDTSTSTVYMELRSLRSEDTAVYYCARGDWFRYFDYWGQGSLVTVSS

SEQ ID NO: 18713 - protein, 120 aa, Artificial Sequence
  Synthetic polypeptide representing artificial human antibody VH domain
EVQLLESGGGLVRPGGSLRLSCTVSGFIFSDVWMNWVRQAPGKGLEWIGRLKRKVDGGTTEYALHVRGRFTISGDDSENTIYLQMNTLKTEDSALYFCTTDPGIELRGHWGQGTLVTVSS

SEQ ID NO: 18714 - protein, 128 aa, Artificial Sequence
  Synthetic polypeptide representing artificial human antibody VH domain
QLQLQESGPGLVKPSETLSLTCTVSGVSITSGSYSWGWIRQPPGKGLEWIGSIYYTGSTYYNPSLKSRVTMSVDTSKNEVSLKLRSLTAADTAVYYCARVSDWSCTGGTCYGNWFDPWGQGTLVTVSS

SEQ ID NO: 18715 - protein, 128 aa, Artificial Sequence
  Synthetic polypeptide representing artificial human antibody VH domain
QVQLVESGGGVVQSGRSLRLSCLVSGFMSSSYAMHWVRQAPGKGLEWVGSISQDGSHEEYGHFVKDRFTISRDESKNTVYLQMNSLRTEDGAVYYCARPIRGGYNYGTRDFYYGMDLWGQGTTVTVSS

SEQ ID NO: 18716 - protein, 133 aa, Artificial Sequence
  Synthetic polypeptide representing artificial human antibody VH domain
QVQLVESGGGVVQPGRSLRLSCAASGFTFSSYGMHWVRQAPGKGLEWVAVMSYDGSNKYYADSVKGRFTISRDNSKNTLYLQMNSLRAADTAVYYCAKDRGKNYDFWSAYYTGRDYYYGMDVWGQGTTVTVSS

SEQ ID NO: 18717 - protein, 126 aa, Artificial Sequence
  Synthetic polypeptide representing artificial human antibody VH domain
EVQLVDSGGALVQPGGSLKLSCAGSGFSFVDSAIHWVRQASGRGLEWVGRIRSKANTYATAYTASVQGRFTISRDDSKNTAYLQMNSLKTEDTAVYYCTRPRAEGYDSGYFDFEYWGQGTLVTVSS

SEQ ID NO: 18718 - protein, 122 aa, Artificial Sequence
  Synthetic polypeptide representing artificial human antibody VH domain
EVQLVESGGDLVQSGGSLRVACAVSGLTVSSNYMSWVRQSPGKGLEWVSVIYSDGSTYYTDSVKGRFTISRDDSKNTLFLQMNSLRAEDTALYYCARDYYAKGDYETIFEYWGQGTPVTVSS

SEQ ID NO: 18719 - protein, 115 aa, Artificial Sequence
  Synthetic polypeptide representing artificial human antibody VH domain
QVQLVQSGSELKKPGASVKVSCKASGYTFTSHALNWVRQAPGQGLEFMGWINPSTGIPTYAQGFTGRFVFSLDTSVNTAYLQISSLQADDTAVYYCARSPWFDPWGQGTLVTVSS

SEQ ID NO: 18720 - protein, 121 aa, Artificial Sequence
  Synthetic polypeptide representing artificial human antibody VH domain
QVTLRESGPALVKPSQTLTLTCTFSGFSLTSSGVCVTWIRQPPGKALEWLALIDWDDDKDYTPSLKTRLTISKDTSKNQVVLTMTNMDPVDTATYYCARLAARPYDAFDIWGQGTMVTVSS

SEQ ID NO: 18721 - protein, 123 aa, Artificial Sequence
  Synthetic polypeptide representing artificial human antibody VH domain
EVRLVESGGGLVQPGGSLRLSCAASGFSFSSYALHWVRQAPGKGLEYVAGISKNGDNTHYAKFVEGRFTISRDNSKNTVYLQMGNLRVEDMAVYSCARDSASGTYYMTFFDYWGQGALVTVSS

SEQ ID NO: 18722 - protein, 118 aa, Artificial Sequence
  Synthetic polypeptide representing artificial human antibody VH domain
QVQVVQSGAEVKRPGASLQVSCEPSEYNFNTYYVHWVRQAPGQGLEWMGMIQPGGDDTIYAQNFQGRVTMTSDTSTNTVYMELNRLTSEDTAVYYCARALGTVSRGDWGQGTLVTVSS

SEQ ID NO: 18723 - protein, 118 aa, Artificial Sequence
  Synthetic polypeptide representing artificial human antibody VH domain
QLQLQESGPGLVKPSETLSLTCTVSGGSVSSSDYYWGWIRQPPGKGLEWIGSIYYSGRTYYNPSLKSRITMSVDTSKNQFSLKLRSVTAADTAVYYCARHRDGDVDYWGQGTLVTVSS

SEQ ID NO: 18724 - protein, 123 aa, Artificial Sequence
  Synthetic polypeptide representing artificial human antibody VH domain
EVQLLESGGGLVQPGGSLRLSCAASGFTFSSYAMSWVRQAPGKGLEWVSAISGSGGSTYYADSVKGRFTISRDNSKNTLYLQMNSLRAEDTAVYYCAKDPYYDFWSGYYYDYWGQGTLVTVSS

SEQ ID NO: 18725 - protein, 126 aa, Artificial Sequence
  Synthetic polypeptide representing artificial human antibody VH domain
QVQLVESGGGVVQPGRSLRLSCAASGFTFSSYAMHWVRQAPGKGLEWVAVISYDGSNKYYADSVKGRFTISRDNSKNTLYLQMNSLRAEDTAVYYCARDQWITMIVVAPYDAFDIWGQGTMVTVSS

SEQ ID NO: 18726 - protein, 127 aa, Artificial Sequence
  Synthetic polypeptide representing artificial human antibody VH domain
QVQLQESGPGLVKPSETLSLTCTVSGGSISSYYWSWIRQPPGKGLEWIGYIYYSGSTNYNPSLKSRVTISVDTSKNQFSLKLSSVTAADTAVYYCARGGAQWELLGRPYYYYGMDVWGQGTTVTVSS

SEQ ID NO: 18727 - protein, 125 aa, Artificial Sequence
  Synthetic polypeptide representing artificial human antibody VH domain
EVQLVESGGGLVQPGGSLRLSCSASGFTFRTHAMHWVRQALGKEPEHISAITSSGSGTYYADSVRDRFTVSRDNSKSTLYLQLSSLRAEDTAIYYCVKETPMKIFGVGFSCFDPWGQGTLVTVSS

SEQ ID NO: 18728 - protein, 123 aa, Artificial Sequence
  Synthetic polypeptide representing artificial human antibody VH domain
QVQLVQSGAEVRKPGAPVKVSCKASGYTFTNYYIHWVRQAPGQGLEWMGMINPSGGSTTYAQKFQGRVSVTRDTSTSTVYMEMSSLRLADTALYFCARSARIPITATDAFDIWGQGTRITVSS

SEQ ID NO: 18729 - protein, 121 aa, Artificial Sequence
  Synthetic polypeptide representing artificial human antibody VH domain
EVQLVESGGGLVQAGGSLRLTCSGSTFKFRVYGMHWVRQAPGKGLEWVSSISWDSGSISYADPVKGRFTIARDNAQSSLSLQLNSLRPDDTALYYCAKDSSAYTHTWIDSWGQGTLVSVSS

SEQ ID NO: 18730 - protein, 131 aa, Artificial Sequence
  Synthetic polypeptide representing artificial human antibody VH domain
EVQLLESGGGLVQPGGSLRLSCAASGFTFSSYAMSWVRQAPGKGLEWVSAISGSGGRTYYADSVKGRFTISRDNPKNTLYLQMNSLRAEDTAVYYCAKDQSSGYSYGSGWGYYYYYGMDVWGQGTTVTVSS

SEQ ID NO: 18731 - protein, 121 aa, Artificial Sequence
  Synthetic polypeptide representing artificial human antibody VH domain
EVQLAESGGGFVRPGGSLRLSCLASGFTFHDYAMHWVRETPGQGLEWVAGISSNSLNIAYADSVKGRFTLSRDNAKNSLSLEMNRLRREDKGRYFCAKGWGTLINLPIGFWGPGTLVTVSS

SEQ ID NO: 18732 - protein, 126 aa, Artificial Sequence
  Synthetic polypeptide representing artificial human antibody VH domain
QLQLQESGPGLVKPSETLSLTCTVSGGSISNNSFHWGWIRQPPGKGLEWIGSMYYSGSTYYNPSLKGRVTISVDTSRNQFSLKLSSVTAADTAVYYCGRLIISSGWYQYYYGMDVWGQGTTVTVSS

SEQ ID NO: 18733 - protein, 126 aa, Artificial Sequence
  Synthetic polypeptide representing artificial human antibody VH domain
QVHLVESGGGVVQPGRSLRLSCAASGFNFATHGMHWVRQAPGKGLEWVAMIWYDGVTKKYLPSVKGRFTISRANSNSTMYLQISSLRTEDSAIYYCVRDLGSSSRGLYYFHGMDVWGQGTTVIVSS

SEQ ID NO: 18734 - protein, 118 aa, Artificial Sequence
  Synthetic polypeptide representing artificial human antibody VH domain
QVQLVESGGDLVKPGGSLRLSCAASGFTFSDYYMNWIRQTPGMGLEWVSYIGSSSSDTNYADSVKGRFTISRDNAKSALYLQMNSLRAEDTAVYYCASYDSSAYLGYWGRGTLVTVSS

SEQ ID NO: 18735 - protein, 125 aa, Artificial Sequence
  Synthetic polypeptide representing artificial human antibody VH domain
EVQLVESGGGLVQPGESLRLSCTASGFSLSTYWMYWVRQAPGKGLVWVSRFNTGGTVTSYADSVKGRFTISRDNAKNTLYLQMNSLRAEDSAVYYCARGLCSGGRCDYYFGMDVWGQGTTVTVSS

SEQ ID NO: 18736 - protein, 118 aa, Artificial Sequence
  Synthetic polypeptide representing artificial human antibody VH domain
EVQVLESGGGLVQPGGSLRLSCAASGFTFRDYAMSWVRQAPGKGLEWVSGISPSAGASYYADSVKGRFTISRDNSKNTLYLQMDSLRAEDTALYYCIRGGWGSRFDFWGQGTLATVSA

SEQ ID NO: 18737 - protein, 125 aa, Artificial Sequence
  Synthetic polypeptide representing artificial human antibody VH domain
QVTLRESGPALVKPTQTLTLTCTFSGFSLSTSGMCVSWIRQPPGKALEWLARIDWDDDKYYSTSLKTRLTISKDTSKNQVVLTMTNMDPVDTATYYCARSSYDILTGYSTEFDYWGQGTLVTVSS

SEQ ID NO: 18738 - protein, 129 aa, Artificial Sequence
  Synthetic polypeptide representing artificial human antibody VH domain
EVQLVESGGGLVKPGGSLRLSCAASGFTFSSYTMNWVRQAPGKGLEWVSSISSSSSYIYYADSVKGRFTISRDNAKNSLYLQMNSLRAEDTAVYYCARDKAVAGILSRAPNYYYGMDVWGQGTTVTVSS

SEQ ID NO: 18739 - protein, 129 aa, Artificial Sequence
  Synthetic polypeptide representing artificial human antibody VH domain
QVQLVQSGAEVKKPGASVKVSCKASGYTFTGYYMHWVRQAPGQGLEWMGWINPNSGGTNYAQKFQGWVTMTRDTSISTAYMELSRLRSDDTAVYYCARGVEWIQLWSRNPKKYNWFDPWGQGTLVTVSS

SEQ ID NO: 18740 - protein, 134 aa, Artificial Sequence
  Synthetic polypeptide representing artificial human antibody VH domain
EVQLLESGGGLVQPGGSLRLSCAASGFTFSSYAMSWVRQAPGKGLEWVSAISGSGGSTYYADSVKGRFTISRDNSKNTLYLQMNSLRAEDTAVYYCAKGDIVVVPAAISWSRYEREALYYFDYWGQGTLVTVSS

SEQ ID NO: 18741 - protein, 116 aa, Artificial Sequence
  Synthetic polypeptide representing artificial human antibody VH domain
QVQLQESGPGLVKPSETLSLTCTVSGGSIGNSYWSWIRQPPGKGLEWVAYIFYTGSAKYNPSLKSRVTISIDTSKKQFSLKLNSVTATDTAVYYCARRGPEAFDYWGQGTLVTVSS

SEQ ID NO: 18742 - protein, 119 aa, Artificial Sequence
  Synthetic polypeptide representing artificial human antibody VH domain
QVQLQESGPGLVKPSGTLSLTCEVANGSISSSNWWTWVRQAPGKGLEWIGEIYHSGTTNFNPSLKSRLYMSVDKSKNQVSLKLTSATAADTAVYYCAKAGVGGGWFDPWGQGALVTVSS

SEQ ID NO: 18743 - protein, 116 aa, Artificial Sequence
  Synthetic polypeptide representing artificial human antibody VH domain
QVQLQESGPGLVKPSETLSLTCSVSGDSISRFYWSWIRQSPGRGLEWIGYIVYSGNTSYTPSLESRVTISVDTSKNQFSLNLRSVTAADTAVYFCARHKGASFDSWSQGTLVTVSS

SEQ ID NO: 18744 - protein, 129 aa, Artificial Sequence
  Synthetic polypeptide representing artificial human antibody VH domain
EVQLVESGGGLVRPGGSLTLSCAASYFAFETYYINWVRQAPGKGLEWISCISHDGVQTFYTDSVRGRFTISRDNAKESVFLEMSDLRAEDTAVYYCARDRSPIVVVPALGHWHYGMDVWGQGTTVAVSS

SEQ ID NO: 18745 - protein, 126 aa, Artificial Sequence
  Synthetic polypeptide representing artificial human antibody VH domain
QVQLVQSGAEVRKPGTSVKISCKASGYTFTNYFMHWVRQAPGQGLEWVGIIQPSAGKTVSAQKFQGRLTMTRDTSTTTFYMELSSLTSEDTAVYYCTRDLEPSVEGADFAPTHDCWGQGTLVTVSS

SEQ ID NO: 18746 - protein, 127 aa, Artificial Sequence
  Synthetic polypeptide representing artificial human antibody VH domain
QVQLVQSGAEVKKPGSSVKVSCKASGGTFSSYAISWVRQAPGQGLEWMGGIIPIFGTANYAQKFQGRVTITADESTSTAYMELSSLRSEDTAVYYCARTGWSTDGSGSYRYDAFDIWGQGTMVTVSS

SEQ ID NO: 18747 - protein, 121 aa, Artificial Sequence
  Synthetic polypeptide representing artificial human antibody VH domain
EVQLVESGGGLLQPGGSLRLSCAASGFTFSEYWMHWVRQAPGKGLVWVSRIDRDGSTTRYADSVKGRFTISRDNAKNTLYLQMNSLRAEDTAVYYCARETPFGGVIVIDNWGQGTLVTVSS

SEQ ID NO: 18748 - protein, 123 aa, Artificial Sequence
  Synthetic polypeptide representing artificial human antibody VH domain
QVQLVESGGGLVKPGGSLRLSCAASGFTFSDYYMSWIRQAPGKGLEWVSYISSSGSTIYYADSVKGRFTISRDNAKNSLYLQMNSLRAEDTAVYYCARDYSLNVGGYDSPNYWGQGTLVTVSS

SEQ ID NO: 18749 - protein, 120 aa, Artificial Sequence
  Synthetic polypeptide representing artificial human antibody VH domain
QVQLVESGGGVVQPGRSLRLSCAASGFTFSSYAMHWVRQAPGKGLEWVAVISYDGSNKYYADSVKGRFTISRDNSKNTLYLQMNSLRAEDTAVYYCARDYGTVTTYPDYWGQGTLVTVSS

SEQ ID NO: 18750 - protein, 114 aa, Artificial Sequence
  Synthetic polypeptide representing artificial human antibody VH domain
EVQLVESGGGLVQPGRSLRLSCTASGFTFGDYAMSWVRQAPGKGLEWVGFIRSKAYGGTTEYAASVKGRFTISRDDSKSIAYLQMNSLKTEDTAVYYCTRQDVWGQGTTVTVSS

SEQ ID NO: 18751 - protein, 110 aa, Artificial Sequence
  Synthetic polypeptide representing artificial human antibody VL domain
QSVLTQPPSASGTPGQRVTISCSGSSSNIGSNTVNWYQQLPGTAPKLLIYSNNQRPSGVPDRFSGSKSGTSASLAISGLQSEDEADYYCAAWDDRLNGVVFGGGTKLTVL

SEQ ID NO: 18752 - protein, 105 aa, Artificial Sequence
  Synthetic polypeptide representing artificial human antibody VL domain
EIVLTQSPATLSLSPGDGATLSCRASQSVRSHLAWYQHKPGQAPRLLIYGASSRATGIPDRFSGSGSGTDFTLTISRLEPEDFAVYYCQQYGSSLFGGGTKVEIK

SEQ ID NO: 18753 - protein, 108 aa, Artificial Sequence
  Synthetic polypeptide representing artificial human antibody VL domain
DIQMTQSPSTLSASVGDRVTITCRASQTIIDWLAWYQQKPGKAPKLLIYDASSLESGVPSRFSGSGSGTEFTLTISSLQPDDFATYYCQQYNSYSPWTFGQGTKVEIK

SEQ ID NO: 18754 - protein, 107 aa, Artificial Sequence
  Synthetic polypeptide representing artificial human antibody VL domain
DIQMTQSPSTLSASVGDRVTITCRASQTIIDWLAWYQQKPGKAPKLLIYTASSLQSGVQSRFSGSGSGTDFTLTISSLQPEDFAIYYCQQYKNHPITFGQGTRLEIK

SEQ ID NO: 18755 - protein, 108 aa, Artificial Sequence
  Synthetic polypeptide representing artificial human antibody VL domain
DIQMTQSPSTLSASVGDRVTITCRASQTIIDWLAWYQQKPGKAPKLLIYDASSLESGVPSRFSGSGSGTEFTLTISSLQPDDFATYYCQQYNSYSPYTFGQGTKLEIK

SEQ ID NO: 18756 - protein, 108 aa, Artificial Sequence
  Synthetic polypeptide representing artificial human antibody VL domain
DIQMTQSPSTLSASVGDRVTITCRASQTIIDWLAWYQQKPGKAPKLLIYTASSLQSGVQSRFSGSGSGTDFTLTISSLQPDDFATYYCQQYNSYSPWTFGQGTKVEIK

SEQ ID NO: 18757 - protein, 106 aa, Artificial Sequence
  Synthetic polypeptide representing artificial human antibody VL domain
DIQMTQSPSTLSASVGDRVTITCRASQTIIDWLAWYQQKPGKAPKLLIYDASSLESGVPSRFSGSGSGTEFTLTISSLQPDDFATYYCQQYNSYSTFGQGTKVEIK

SEQ ID NO: 18758 - protein, 110 aa, Artificial Sequence; identical to SEQ ID NO: 18751
  Synthetic polypeptide representing artificial human antibody VL domain

SEQ ID NO: 18759 - protein, 107 aa, Artificial Sequence
  Synthetic polypeptide representing artificial human antibody VL domain
EIVLTQSPATLSLSPGERATLSCGASQSVSSHLAWYQQKPGQAPRLLIYDASNRATGIPARFSGRGSGTDFTLTISSLEPEDFAVYYCQQRSNWPLTFGGGTKVEIK

SEQ ID NO: 18760 - protein, 108 aa, Artificial Sequence
  Synthetic polypeptide representing artificial human antibody VL domain
EIVLTQSPGTVSLSPGERATLSCGASQSLSSSYLAWYQQKPGQAPRLLIYDASTRATGIPDRFSGSGSGTDFTLTISRLEPEDFGVYYCQHYGSSPRTFGQGTKLEIK

SEQ ID NO: 18761 - protein, 110 aa, Artificial Sequence
  Synthetic polypeptide representing artificial human antibody VL domain
QSALTQPASVSGSPGQSITISCTGTSSDIGGYDYVSWYQQHPGKAPKLMIYDVTYRPSGVSYRFSASKSGNTASLTISGLQAEDEADYYCCSYAGSYTYVFGSGTKVTVL

SEQ ID NO: 18762 - protein, 110 aa, Artificial Sequence
  Synthetic polypeptide representing artificial human antibody VL domain
QSALTQPASVSGSPGQSITISCTGTSSDVGGYNYVSWYQQYPGKAPKVMIYDVTKRPSGVPDRFSASKSGNTASLTISGLQAEDEADYYCCSYAGSYTYVFGSGTKVTVL

SEQ ID NO: 18763 - protein, 111 aa, Artificial Sequence
  Synthetic polypeptide representing artificial human antibody VL domain
DIVMTQSPLSLPVTPGEPASISCRSSQSLLHSNGYNYLDWYLQKPGQSPQLLIYLGSNRASGVPDRFSGSGSGTDFTLKISRVEAEDVGVYYCMQGTHWRTFGQGTKLEIK

SEQ ID NO: 18764 - protein, 112 aa, Artificial Sequence
  Synthetic polypeptide representing artificial human antibody VL domain
DVVMTQSPLSLPVTLGQPASISCRSSQSLVHSDGNTYLNWFQQRPGQSPRRLIYKVSNRDSGVPDRFSGSGSGTDFTLKISRVEAEDVGVYYCMQALQIALTFGGGTKVEIK

SEQ ID NO: 18765 - protein, 107 aa, Artificial Sequence
  Synthetic polypeptide representing artificial human antibody VL domain
DIQMTQSPSSLSASVGDRVTITCRASQSISSYLNWYQQKPGKAPKLLIYAASSLQSGVPSRFSGSGSGTDFTLTISSLQPEDFATYYCQQSYSTPYTFGQGTKLEIK

SEQ ID NO: 18766 - protein, 107 aa, Artificial Sequence
  Synthetic polypeptide representing artificial human antibody VL domain
EIVLTQSPATLSLSPGERATLSCRASQSVSSYLAWYQQKPGQAPRLLIYDASSRATAIPARFSGSGSGTDFTLTISSLEPEDFGVYYCQQHSTWPLTFGQGTRLEIK

SEQ ID NO: 18767 - protein, 110 aa, Artificial Sequence
  Synthetic polypeptide representing artificial human antibody VL domain
QSALTQPASVSGSPGQSITISCTGTSSDVGGYNYVSWYQQHPGKAPKLMIYDVTNRPSGISNRFSGSKSGNTASLTVSGLQAEDEADYYCSSYAGSNNVVFGGGTKLTVL

SEQ ID NO: 18768 - protein, 111 aa, Artificial Sequence
  Synthetic polypeptide representing artificial human antibody VL domain
QPVLTQSSSASASLGSSVKLTCTLSSGHSNYIIVWHQQQPGKAPRYLMNLEGSGTYNKGSGVPDRFSGSSSGADRYLTISNLQSEDEADYYCEAWDSNTVVFGGGTSLTVL

SEQ ID NO: 18769 - protein, 110 aa, Artificial Sequence
  Synthetic polypeptide representing artificial human antibody VL domain
QSALTQPASVSGSPGQSITISCTATGSDVGSYSLVSWYQQNPGKAPKLIIYEDSKRPSGVSNRFSGSKSGNTASLTISGLQAEDEVDYYCCSYAGSNTWVFGGGTKVTVL

SEQ ID NO: 18770 - protein, 108 aa, Artificial Sequence
  Synthetic polypeptide representing artificial human antibody VL domain
SYVVTQSPSESVAPGRTARITCEASNIGSKSVHWHQQKPGQAPVLVVYDDSDRPSGIPERFSGSNSGNMATLTISRVEAGDEADYVCLVWDSSSDHWVFGGGTKLTVL

SEQ ID NO: 18771 - protein, 110 aa, Artificial Sequence
  Synthetic polypeptide representing artificial human antibody VL domain
QSALTQPASVSGSPGQSITISCSGTSRDIGGYMSVSWYQQHPGKAPKLMIYDVNKRPSGVSERFSGSKSGNTASLTISGLQAEDEADYYCSSYTSSSTYVFGTGTKVSVL

SEQ ID NO: 18772 - protein, 110 aa, Artificial Sequence
  Synthetic polypeptide representing artificial human antibody VL domain
QSALTQPASVSGSPGQSITISCTGTSSDIGSSNFVSWYQQHPGKAPKVMIFDVSNRPSGVSDRFSGSKSGNTASLTISGLQAEDEASYHCTSHTIYGTRVFGGGTKVTVL

SEQ ID NO: 18773 - protein, 109 aa, Artificial Sequence
  Synthetic polypeptide representing artificial human antibody VL domain
EIVLTQSPGTLSLSPGERATLSCRASQSVSSSYLAWYQQKPGQAPRLLIYGASSRATGIPDRFSGSGSGTDFTLTISRLEPEDFAVYYCQQYGSSPRYTFGQGTKLEIK

SEQ ID NO: 18774 - protein, 112 aa, Artificial Sequence
  Synthetic polypeptide representing artificial human antibody VL domain
QSALTQPASVSGSPGQSITISCTGTSSDVGGYNYVSWYQQHPGKAPKLMIYDVSKRPSGVSNRFSGSKSGNTASLTISGLQAEDEADYYCSSYTSSSTFGWVFGGGTKLTVL

SEQ ID NO: 18775 - protein, 109 aa, Artificial Sequence
  Synthetic polypeptide representing artificial human antibody VL domain
QSALTQPASVSGSPGQSITISCTGTSSDVGSYNLVSWYQQHPGKAPKLMIYEVSKRPSGVSNRFSGSKSGNTASLTISGLQAEDEADYYCCSYAGSSRIFGGGTKLTVL

SEQ ID NO: 18776 - protein, 107 aa, Artificial Sequence
  Synthetic polypeptide representing artificial human antibody VL domain
EIVLTQSPGTLSLSPGERATLSCRASQSVSSSYLAWYQYKPGQSPRLLIYGASSRATGIPDRFSGSGSGTDFTLTISRLEPEDFAVYYCQQYGSPWTFGQGTKVETK

SEQ ID NO: 18777 - protein, 107 aa, Artificial Sequence
  Synthetic polypeptide representing artificial human antibody VL domain
DIQMTQSPSSLSASVGDRVTITCRASQSIDFYLNWYHQKPGKAPTLLIYPPSSLQSEVPSRLSGGGSGTEFSLTISSLQPEDSGTYYCQQSYVTPYTFGQGTKLEIK

SEQ ID NO: 18778 - protein, 116 aa, Artificial Sequence
  Synthetic polypeptide representing artificial human antibody VL domain
QPVLTQPPSASASLGASVTLTCTLSSGYSNYKVDWYQQRPGKGPRFVMRVGTGGIVGSKGDGIPDRFSVLGSGLNRYLTIKNIQEEDESDYHCGADHGSGSNFLVVFGGGTKLTVL

SEQ ID NO: 18779 - protein, 107 aa, Artificial Sequence
  Synthetic polypeptide representing artificial human antibody VL domain
AIRMTQSPSSFSASTGDRVTITCRASQGISSYLAWYQQKPGKAPKLLIYAASTLQSGVPSRFSGSGSGTDFTLTISCLQSEDFATYYCQQYYSYPLTFGGGTKVEIK

SEQ ID NO: 18780 - protein, 111 aa, Artificial Sequence
  Synthetic polypeptide representing artificial human antibody VL domain
QLVLTQSPSASASLGASVKLTCTLSSRHGNYAIAWHQQQPEKGPRYLMKVNSDGSHNKGDGIPDRFSGSSSGAERYLTISSLQSEDEADYYCQTWGTGMQMFGGGTKVTVL

SEQ ID NO: 18781 - protein, 109 aa, Artificial Sequence
  Synthetic polypeptide representing artificial human antibody VL domain
EIVLTQSPGTLSLSPGERATLSCRASQSVSSSYLAWYQQKPGQAPRLLIYGASSRATGIPDRFSGSGSGTDFTLTISRLEPEDFAVYYCQQYGSSPPLTFGPGTKVDIK

SEQ ID NO: 18782 - protein, 107 aa, Artificial Sequence
  Synthetic polypeptide representing artificial human antibody VL domain
DIQMTQSPPSLSASVGDRVTITCRASQGIRNDLGWYQQKPGKAPKRLIYGASRLQSGVPSRFSGSGSGTEFTLTISSLQPEDFATYYCLQNNRYPRTFGQGTRVEIK

SEQ ID NO: 18783 - protein, 108 aa, Artificial Sequence
  Synthetic polypeptide representing artificial human antibody VL domain
EIVLTQSPATLSLSPGERATLSCRASQSVSSYLAWYQQKPGQAPRLLIYDASNRATGIPARFSGSGSGTDFTLTISSLEPEDFAVYYCQQRSNWPPWTFGQGTKVEIK

SEQ ID NO: 18784 - protein, 108 aa, Artificial Sequence
  Synthetic polypeptide representing artificial human antibody VL domain
SYELTQPPSVSVSPGQTARITCTGDALPKQYAYWYQQKPGQAPILLIYADIERPSGIPERFSGSSSGTTFTLTISGVQAEDEADYYCQSADSSGTFYVFGGGTRLTVL

SEQ ID NO: 18785 - protein, 107 aa, Artificial Sequence
  Synthetic polypeptide representing artificial human antibody VL domain
DIQMTQSPSSLSASVGDTVTITCRASQGISDFLAWYQQRPGKVPELLIYAASTLQPGVPSRFSGSGSGTDFTLTISSLQPEDVATYYCQKYNSAPWTFGQGTKVEIK

SEQ ID NO: 18786 - protein, 108 aa, Artificial Sequence
  Synthetic polypeptide representing artificial human antibody VL domain
AIQLTQSPSSLSASVGDRVSITCRASQGISTALAWYQQRPGKPPRLLIHDVSSLERGVPSRFSGSGSGTDFTLTITTLQPEDSATYFCQQFYNFPFFTFGPGTKVDIK

SEQ ID NO: 18787 - protein, 108 aa, Artificial Sequence
  Synthetic polypeptide representing artificial human antibody VL domain
EIVMTQSPATLSVSPGERATLSCRASQSVSSNLAWYQQKPGQAPRLLIYGASTRATGIPARFSGSGSGTEFTLTISSLQSEDFAVYYCQQYNNWPPYTFGQGTKLEIK

SEQ ID NO: 18788 - protein, 107 aa, Artificial Sequence
  Synthetic polypeptide representing artificial human antibody VL domain
DIQMTQSPSSLSASVGDRVTITCRASQGIRNDLGWYQQKPGKAPKRLIYAASSLQSGVPSRFSGSGSGTEFTLTISSLQPEDFATYYCLQHNSYPLTFGGGTKVEIK

SEQ ID NO: 18789 - protein, 108 aa, Artificial Sequence
  Synthetic polypeptide representing artificial human antibody VL domain
SYVLTQPPSVSVAPGKTARITCGGNNIGSKSVHWYQQKPGQAPVLVIYYDSDRPSGIPERFSGSNSGNTATLTISRVEAGDEADYYCQVWDSSSDHGVFGGGTKLTVL

SEQ ID NO: 18790 - protein, 114 aa, Artificial Sequence
  Synthetic polypeptide representing artificial human antibody VL domain
DIVMTQSPDSLAVSLGERATINCKSSQSVLYSSNNKNYLAWYQQKPGQPPKLVIYWASTRESGVPDRFSGSGSGTDFTLTISSLQAEDAAVYYCQQYYSTPPYTFGQGTKLEIK

SEQ ID NO: 18791 - protein, 110 aa, Artificial Sequence
  Synthetic polypeptide representing artificial human antibody VL domain
QSALTQPASVSGSPGQSITISCTGTSSDVGGYNYVSWYQQHPGKAPKLMIYDVSKRPSGVSNRFSGSKSGNTASLTISGLQAEDEADYYCSSYTSSSTYVFGTGTKVTVL

SEQ ID NO: 18792 - protein, 110 aa, Artificial Sequence
  Synthetic polypeptide representing artificial human antibody VL domain
QSALAQPASVSASPGQSITISCTGSRSDIGAYNYVSWYQQQPNKAPKVVMYDVSRRPSGIPGRFSGSKSGNTASLTISGLQAADEADYYCCSYTDRFSYVFGSGTRVTVL

SEQ ID NO: 18793 - protein, 110 aa, Artificial Sequence
  Synthetic polypeptide representing artificial human antibody VL domain
QSALTQPASVSGSPGQSITISCTGTSSDVGSYNLVSWYRQHPGEAPKLLIYEVTKRPSGISNRFSGSKSGNSASLTISGLQAEDEADYYCCSFAGSSTYVFGSGTKVTVL

SEQ ID NO: 18794 - protein, 107 aa, Artificial Sequence
  Synthetic polypeptide representing artificial human antibody VL domain
EIVMTQSPATLSVSPGERATLSCRASQSVSSNLAWYQQKPGQAPRLLIYGASTRATGTPARFSGSGSGTEFTLTISSLQAEDFAVYYCQQYNNWPRTFGQGTKVEIK

SEQ ID NO: 18795 - protein, 107 aa, Artificial Sequence
  Synthetic polypeptide representing artificial human antibody VL domain
SSELTQDPAVSVALGQTVRITCQGDSLRSYYASWYQQKPGQAPVLVIYGKNNRPSGIPDRFSGSSSGNTASLTITGAQAEDEADYYCNSRDSSGNQVFGGGTKLTVL

SEQ ID NO: 18796 - protein, 112 aa, Artificial Sequence
  Synthetic polypeptide representing artificial human antibody VL domain
DIVMTQTPLSLSVTPGQPASISCKSSQSLLHSDGKTYLYWYLQKPGQPPQLLIYEVSNRFSGVPDRFSGSGSGTDFTLKISRVEAEDVGVYYCMQSIQLPLGFGQGTKVEIK

SEQ ID NO: 18797 - protein, 105 aa, Artificial Sequence
  Synthetic polypeptide representing artificial human antibody VL domain
EIVLTQSPGTLSLSPGGRATLSCRASQSVSSSYLAWYQQKPGQAPRLLISGASTRAAGISDRFSVSGSGTDFTLIISRLEAEDSAVYYCQRSRGSFGQGTKLEIK

SEQ ID NO: 18798 - protein, 109 aa, Artificial Sequence
  Synthetic polypeptide representing artificial human antibody VL domain
EILMTQSPATLSLSPGERATLSCRASQSLRNTLAWYQQKPGQAPRLLIYGVSTRATGIPARFSGSGSGTEFTLTISSLQSEDFAVYYCQQYDDWPLGITFGPGTKVDIK

SEQ ID NO: 18799 - protein, 111 aa, Artificial Sequence
  Synthetic polypeptide representing artificial human antibody VL domain
QSVLTQPPSVSGAPGQRVTISCTGSTSNIGADYDVHWYQHLPGTAPKLLIYRNNNRPSGVPDRFSGSKSGTSASLAITGLQAEDEADYYCQSYDSSLSGSVFGTGTKVTVL

SEQ ID NO: 18800 - protein, 113 aa, Artificial Sequence
  Synthetic polypeptide representing artificial human antibody VL domain
DILMTQSPDSLAVSLGERATINCKSNQSLSYSSKYKNYLAWYQQKPGQPPKLLIYWASTRESGVPDRFSGSGSATDFTLTISSLQAEDVAVYFCQQYYSIPYTFGQGTKLEIK

SEQ ID NO: 18801 - protein, 111 aa, Artificial Sequence
  Synthetic polypeptide representing artificial human antibody VL domain
QSALTQPPSVSGSPGQSVTISCTGTSSDIGGYDRVAWYQQSPGTAPKLLIYEVTNRPSGVPYRFFGSKSANTASLTISGLQAGDEADYYCYSYTSTTNRYVFGSGTKVTVL

SEQ ID NO: 18802 - protein, 113 aa, Artificial Sequence
  Synthetic polypeptide representing artificial human antibody VL domain
QSVLTQPPSASGTPGQRVTISCSGSSSNIGSNYVYWYQQLPGTAPKLLIYRNNQRPSGVPDRFSGSKSGTSASLAISGLRSEDEADYYCAAWDDSLSGRAIWVFGGGTKLTVL

SEQ ID NO: 18803 - protein, 110 aa, Artificial Sequence
  Synthetic polypeptide representing artificial human antibody VL domain
QSVLTQPPSASGTPGQRVSISCSGRRSNIGSNAVNWYQHLPGTAPKLLIYSNNQRPSGVPDRFSGSNSGTSASLAISEVLAEDEGDYYCASWDDSLKGVVIGGGTKLSVL

SEQ ID NO: 18804 - protein, 110 aa, Artificial Sequence
  Synthetic polypeptide representing artificial human antibody VL domain
QSVLTQPPSVSAAPGQKVTISCSGSSSNIGNNYVSWYQQLPGTAPKLLIYDNNKRPSGIPDRFSGSKSGTSATLGITGLQTGDEADYYCGTWDSSLSAWVFGGGTKLTVL

SEQ ID NO: 18805 - protein, 108 aa, Artificial Sequence
  Synthetic polypeptide representing artificial human antibody VL domain
SSELTQDPAVSVALGQTVRITCQGDSLRSYYASWYQQKPGQAPVLVIYGKNNRPSGIPDRFSGSSSGNTASLTITGAQAEDEADYYCNSRDSSGNHWVFGGGTKLTVL

SEQ ID NO: 18806 - protein, 109 aa, Artificial Sequence
  Synthetic polypeptide representing artificial human antibody VL domain
EIVLTQSPGTLSLSPGERATLSCRASQSINRNFLAWYQQKPGQTPRLLLYGTSTRATGIPDRFSGSGSGTDFTLTISRLEPEDFAVYYCQQYDASALWTFGQGTKVEIK

SEQ ID NO: 18807 - protein, 108 aa, Artificial Sequence
  Synthetic polypeptide representing artificial human antibody VL domain
DIQMTQSPSSLSASVGDRVTITCRASQSISSYLNWYQQKPGKAPKLLIYAASSLQSGVPSRFSGSGSGTDFTLTISSLQPEDFATYYCQQSYSTPRITFGQGTRLEIK

SEQ ID NO: 18808 - protein, 108 aa, Artificial Sequence
  Synthetic polypeptide representing artificial human antibody VL domain
SYELTQPPSVSVSPGQTARITCSGDALPKQYAYWYQQKPGQAPVLVIYKDSERPSGIPERFSGSSSGTTVTLTISGVQAEDEADYYCQSADSSGTLWVFGGGTKLTVL

SEQ ID NO: 18809 - protein, 112 aa, Artificial Sequence
  Synthetic polypeptide representing artificial human antibody VL domain
DIVMTQTPLSLSVTPGQPASISCKSSQSLLHSDGKTYLYWYLQKPGQPPQLLIYEVSNRFSGVPDRFSGSGSGTDFTLKISRVEAEDVGVYYCMQSIQLALTFGGGTKVEIK

SEQ ID NO: 18810 - protein, 107 aa, Artificial Sequence
  Synthetic polypeptide representing artificial human antibody VL domain
DIQMTQSPSSLSASVGDRVTITCRASQGITNHLAWYQQKPGKVPKLLIYAASTLQSGVPSRFSGSGSGTDFTLTISSLQPEDVATYYCQKYNNAPWTFGQGTKVDLK

SEQ ID NO: 18811 - protein, 106 aa, Artificial Sequence
  Synthetic polypeptide representing artificial human antibody VL domain
SYELTQPPSVSVSPGQTASITCSGDKLGDKYACWYQQKPGQSPVLVIYQDSKRPSGIPERFSGSNSGNTATLTISGTQAMDEADYYCQAWDSSTVVFGGGTKLTVL

SEQ ID NO: 18812 - protein, 108 aa, Artificial Sequence
  Synthetic polypeptide representing artificial human antibody VL domain
SYELTQPPSVSVSPGQTARITCSGDALPKKYAYWYQQKSGQAPVLVIYEDSKRPSGIPERFSGSSSGTMATLTISGAQVEDEADYYCYSTDSSGNHWVFGGGTKLTVL

SEQ ID NO: 18813 - protein, 112 aa, Artificial Sequence
  Synthetic polypeptide representing artificial human antibody VL domain
DIVMTQSPLSLPVTPGEPASISCRSSQSLLHSNGYNYLDWYLQKPGQSPQLLIYLGSNRASGVPDRFSGSGSGTDFTLKISRVEAEDVGVYYCMQALQTPITFGQGTRLEIK

SEQ ID NO: 18814 - protein, 113 aa, Artificial Sequence
  Synthetic polypeptide representing artificial human antibody VL domain
DIVMTQTPLSLPVTPGEPASISCRSSQSLLDSDDGNTYLDWYLQKPGQSPQLLIYTLSYRASGVPDRFSGSGSGTDFTLKISRVEAEDVGVYYCMQRIEFPWTFGQGTKVEIK

SEQ ID NO: 18815 - protein, 111 aa, Artificial Sequence
  Synthetic polypeptide representing artificial human antibody VL domain
DIVMTQSPLSLPVTPGEPASISCRSSQSLLHSNGYNYLDWYLQKPGQSPQLLIYLGSNRASGVPDRFSGSGSGTDFTLKISRVEAEDVGVYYCMQALQPYTFGQGTKLEIK

SEQ ID NO: 18816 - protein, 110 aa, Artificial Sequence
  Synthetic polypeptide representing artificial human antibody VL domain
QSALTQPASVSGSPGQSITISCTGTSSDIGAYNYVSWSQQHPGKAPKLMIYDVNKRPSGVSNRFSGSKSGNTASLTISGLQAEDEADYYCSTFTSSTTLVFGTGTKVTVL

SEQ ID NO: 18817 - protein, 108 aa, Artificial Sequence
  Synthetic polypeptide representing artificial human antibody VL domain
EIVLTQSPGTLSLSPGERATLSCRASQSVSSSYLAWYQQKPGQAPRLLIYGASSRATGIPDRFSGSGSGTDFTLTISRLEPEDFAVYYCQQYGSSLFTFGPGTKVDIK

SEQ ID NO: 18818 - protein, 110 aa, Artificial Sequence
  Synthetic polypeptide representing artificial human antibody VL domain
QAGPTQPPSVSKGLRQTATLTCTGNSNNVGNQGAAWLQQHQGHPPKLLSYRNHNRPSGISERFSASRSGNTASLTITGLQPEDEADYYCLAWDDSLTAWVFGGGTRLTVL

SEQ ID NO: 18819 - protein, 113 aa, Artificial Sequence
  Synthetic polypeptide representing artificial human antibody VL domain
DIVMTQSPDSLAVSLGERATISCKSSQSVLYTPNNKNYLAWYQHKPGQPPKLLIYWASTRESGVPARFRGSGSGTDFTLTISGLQAEDVAVYYCQQYFAPPQTFGQGTKVEIK

SEQ ID NO: 18820 - protein, 106 aa, Artificial Sequence
  Synthetic polypeptide representing artificial human antibody VL domain
EIVMTQSPATLSVSPGERATLSCRASQSVSSNLAWYQQKPGQAPRLLIYGASTRATGIPARFSGSGSGTEFTLTISSLQSEDFAVYYCQQYNNWYTFGQGTKLEIK

SEQ ID NO: 18821 - protein, 110 aa, Artificial Sequence
  Synthetic polypeptide representing artificial human antibody VL domain
QSVLTQPPSASGAPGQRVTISCSGSSSNIGGNTVNWYQQVPGTAPKLLIFSDNQRPSGVPDRISGSKSGTSASLAISGLQSEDEADYYCALWDDSLTGYVFGTGTKVTVL

SEQ ID NO: 18822 - protein, 107 aa, Artificial Sequence
  Synthetic polypeptide representing artificial human antibody VL domain
EIVMTQSPATLSVSPGERATLSCRASQTINNNLAWYQQKPGQAPRLLIYGASTRATGLPARFSGTESGTEFTLTISSLQSEDFAVYYCQQYHDWPLTFGGGTKVEIK

SEQ ID NO: 18823 - protein, 110 aa, Artificial Sequence
  Synthetic polypeptide representing artificial human antibody VL domain
QSALTQPASVSGSPGQSITISCTGTSSDVGSYNLVSWYQQHPGKAPKLMIYEVSKRPSGVSNRFSGSKSGNTASLTISGLQAEDEADYYCCSYAGSSTFVFGTGTKVTVL

SEQ ID NO: 18824 - protein, 111 aa, Artificial Sequence
  Synthetic polypeptide representing artificial human antibody VL domain
QSVLTQPPSASGTPGQRVTISCSGSSSNIGSNYVYWYQQLPGTAPKLLIYRNNQRPSGVPDRFSGSKSGTSASLAISGLRSEDEADYYCAAWDDSLSGDVVFGGGTKLTVL

SEQ ID NO: 18825 - protein, 107 aa, Artificial Sequence
  Synthetic polypeptide representing artificial human antibody VL domain
DIQMTQSPSSLSASVGDRVTMTCRASQGIGNKLHWYQQKPGKAPKLLIYDASTLERGVPSRFSGSGSGTYFTLTISGLQPEDISTFYCQQYDILPITYGQGTKLEIK

SEQ ID NO: 18826 - protein, 110 aa, Artificial Sequence
  Synthetic polypeptide representing artificial human antibody VL domain
QAVVTQEPSLTVSPGGTVTLTCGSSTGAVTSGHYPYWFQQKPGQAPRTLIYDTSNKHSWTPARFSGSLLGGKAALTLSGAQPEDEAEYYCLLSYSGARPVFGGGTKLTVL

SEQ ID NO: 18827 - protein, 108 aa, Artificial Sequence
  Synthetic polypeptide representing artificial human antibody VL domain
AIQLTQSPSSLSASVGDRVSITCRASQGISTALAWYQQKPGKAPELLIHDVSSLQSGVPSRFSGSGSGTDFTLTISSLQPEDFATYYCQHFYNYPFFTFGPGTKVHIK

SEQ ID NO: 18828 - protein, 113 aa, Artificial Sequence
  Synthetic polypeptide representing artificial human antibody VL domain
DIVMTQSPLSLPVTPGEPASISCRSSQSLLHSNGYNYLDWYLQKPGQSPQLLIYLGSNRASGVPDRFSGSGSGTDFTLKISRVEAEDVGVYYCMQALQTPRLTFGGGTKVEIK

SEQ ID NO: 18829 - protein, 111 aa, Artificial Sequence
  Synthetic polypeptide representing artificial human antibody VL domain
QLVLTQSPSASASLGASVKLTCTLSSGHSSYAIAWHQQQPEKGPRYLMKLNSDGSHSKGDGIPDRFSGSSSGAERYLTISSLQSEDEADYYCQTWGTGLWVFGGGTKLTVL

SEQ ID NO: 18830 - protein, 107 aa, Artificial Sequence
  Synthetic polypeptide representing artificial human antibody VL domain
DIQMTQSPSSLSASVGDRVTITCRASQGIRNDLGWYQQKPGKAPKRLIYAASSLQSGVPSRFSGSGSGTEFTLTISSLQPEDFATYYCLQHNSYPYTFGQGTKLEIK

SEQ ID NO: 18831 - protein, 112 aa, Artificial Sequence
  Synthetic polypeptide representing artificial human antibody VL domain
DIVMTQSPLSLPVTPGEPASISCRSSQSLLHSNGYNYLDWYLQKPGQSPQLLIYLGSNRASGVPDRFSGSGSGTDFTLKISRVEAEDVGVYYCMQALQTPLTFGGGTKVEIK

SEQ ID NO: 18832 - protein, 107 aa, Artificial Sequence; identical to SEQ ID NO: 18765
  Synthetic polypeptide representing artificial human antibody VL domain

SEQ ID NO: 18833 - protein, 106 aa, Artificial Sequence
  Synthetic polypeptide representing artificial human antibody VL domain
DIQMTQSPSTLSASVGDRVTITCRASQSISSWLAWYQQKPGKAPKLLIYKASSLESGVPSRFSGSGSGTEFTLTISSLQPDDFATYYCQQYNSYWTFGQGTKVEIK

SEQ ID NO: 18834 - protein, 107 aa, Artificial Sequence
  Synthetic polypeptide representing artificial human antibody VL domain
DIQMTQSPSSLSASVGDRVTITCRASQSISSYLNWYQQKPGKAPKLLIYAASSLQSGVPSRFSGSGSGTDFTLTISSLQPEDFATYYCQQSYSTPRAFGQGTRLEIK

SEQ ID NO: 18835 - protein, 112 aa, Artificial Sequence
  Synthetic polypeptide representing artificial human antibody VL domain
DIVMTQSPLSLPVTPGEPASISCRSSQSLLHSNGYNYLDWYLQKPGQSPQLLIYLGSNRASGVPDRFSGSGSGTDFTLKISRVEAEDVGVYYCMQALQTPYTFGQGTKLEIK

SEQ ID NO: 18836 - protein, 108 aa, Artificial Sequence [sequence omitted]

SEQ ID NO: 18837 - protein, 110 aa, Artificial Sequence
  Synthetic polypeptide representing artificial human antibody VL domain
QSALAQPASVSGSPGQSITISCTGTRSDIGSYNYVSWYQQHPGRAPRVLIYDVSRRPSGVPNRFSASKSGYTAFLTISGLRPEDEADYYCCSYTSSLSYVFGSGTKVTVL

SEQ ID NO: 18838 - protein, 108 aa, Artificial Sequence
  Synthetic polypeptide representing artificial human antibody VL domain
SYELTQPPSVSVSPGQTARITCSGDALPKQYAYWYQQKPGQAPVLVIYKDSERPSGIPERFSGSSSGTTVTLTISGVQAEDEADYYCQSADSSGTYVVFGGGTKLTVL

SEQ ID NO: 18839 - protein, 113 aa, Artificial Sequence
  Synthetic polypeptide representing artificial human antibody VL domain
DVVMTQSPLSLPVTLGQPASISCRSSQSLVYSDGNTYLNWFQQRPGQSPRRLIYKVSNRDSGVPDRFSGSGSGTDFTLKISRVEAEDVGVYYCMQGTHWPRLTFGGGTKVEIK

SEQ ID NO: 18840 - protein, 107 aa, Artificial Sequence
  Synthetic polypeptide representing artificial human antibody VL domain
SYVLTQPPSVSVAPGKTARITCGGNNIGSKSVHWYQQKPGQAPVLVIYYDSDRPSGIPERFSGSNSGNTATLTISRVEAGDEADYYCQVWDSSSDYVFGTGTKVTVL

SEQ ID NO: 18841 - protein, 107 aa, Artificial Sequence
  Synthetic polypeptide representing artificial human antibody VL domain
DIQMTQSPSSVSASVGDTVTFTCRASQDVGAYIAWYQQRPGQPPKLLIYAASALHDGVPSRFIGRRSGTDYTLTIRSLQADDFATYYCQQGYLFPYTFGPGTTVDIK

SEQ ID NO: 18842 - protein, 110 aa, Artificial Sequence
  Synthetic polypeptide representing artificial human antibody VL domain
QSALTQPASVSGSPGQSITISCTGASGNVGRYNLVSWFQQEPGKAPKLMVYEVSRRPSGVSDRFSGSKSGNTASLTISGLQAEDEADYYCWSYAGGSDWVFGGGTKLTVL

SEQ ID NO: 18843 - protein, 112 aa, Artificial Sequence
  Synthetic polypeptide representing artificial human antibody VL domain
DIVMTQTPLSSPVTLGQPASISCRSSQSLVHRDGNTHLSWLQQRPGQSPRLLIYKISNRFTGVPDRFTGSGAGTDFTLHISRVEAEDVGIYYCMQATQFPYTFGQGTKLDIK

SEQ ID NO: 18844 - protein, 107 aa, Artificial Sequence [sequence omitted]

SEQ ID NO: 18845 - protein, 106 aa, Artificial Sequence
  Synthetic polypeptide representing artificial human antibody VL domain
DIQMTQSPSSVSASVGDRVTITCRASQGISSWLAWYQQKPGKAPKLLIYAASSLQSGVPSRFSGSGSGTDFTLTISSLQPEDFATYYCQQANSFPRFGPGTKVDIK

SEQ ID NO: 18846 - protein, 113 aa, Artificial Sequence
  Synthetic polypeptide representing artificial human antibody VL domain
DIVMTQSPDSLTLSLGERATINCRSSQSVLYTSNNKDYLAWYQQKPGQPPKLLIYWASTRESGVPDRFSGSGSGTDFTLTISSLQAEDVAVYYCQQYYGSPLAFGGGTKVEIK

SEQ ID NO: 18847 - protein, 107 aa, Artificial Sequence
  Synthetic polypeptide representing artificial human antibody VL domain
DIQMTQSPSSLSASVGDRVTITCQASQDISNYLNWYQQKPGKAPKLLIYDASNLETGVPSRFSGSGSGTDFTFTISSLQPEDIATYYCQQYDNLPYTFGQGTKLEIK

SEQ ID NO: 18848 - protein, 109 aa, Artificial Sequence
  Synthetic polypeptide representing artificial human antibody VL domain
EIVLTQSPGTLSLSPGERATLSCRASQSVSSSYLAWYQQKPGQAPRLLIYGASSRATGIPDRFSGSGSGTDFTLTISRLEPEDFAVYYCQQYGSSPMYTFGQGTKLEIK

SEQ ID NO: 18849 - protein, 109 aa, Artificial Sequence
  Synthetic polypeptide representing artificial human antibody VL domain
EIVLTQSPGTLSLSPGERATLSCRASQSVSSSYLAWYQQKPGQAPRLLIYGASSRATGIPDRFSGSGSGTDFTLTISRLEPEDFAVYYCQQYGSSPPFTFGPGTKVDIK

SEQ ID NO: 18850 - protein, 112 aa, Artificial Sequence
  Synthetic polypeptide representing artificial human antibody VL domain
DIVMTQSPLSLPVTPGDPASFSCKSSQSLLHSNGYNYLDWYVQKPGQSPQLLIFLGSSRASGVPDRFSGSGSATDFTLKISRVEAEDVGVYYCMQAIQSPGTFGQGTKLEIK

SEQ ID NO: 18851 - protein, 110 aa, Artificial Sequence
  Synthetic polypeptide representing artificial human antibody VL domain
QSVLTQPPSASGTPGQRVTISCSGSSSNIGSNYVYWYQQLPGTAPKLLIYRNNQRPSGVPDRFSGSKSGTSASLAISGLRSEDEADYYCAAWDDSLSGHVFGTGTKVTVL

SEQ ID NO: 18852 - protein, 110 aa, Artificial Sequence
  Synthetic polypeptide representing artificial human antibody VL domain
QSALTQPRSVSGSPGQSVTISCTGTSSDVGGYNYVSWYQQHPGKAPKLMIYDVSKRPSGVPDRFSGSKSGNTASLTISGLQAEDEADYYCCSYAGSYTYVFGTGTKVTVL

SEQ ID NO: 18853 - protein, 107 aa, Artificial Sequence
  Synthetic polypeptide representing artificial human antibody VL domain
AIQMTQSPSSLSASIGDRVTITCRASQAIRDELGWYQVKPGKAPKLLIYATSSLQGGVPSRFSGSGSGTNFTLTISSLQPEDFATYYCLQDHNYLWTFGHGTTVEAK

SEQ ID NO: 18854 - protein, 107 aa, Artificial Sequence
  Synthetic polypeptide representing artificial human antibody VL domain
DIQVTQSPSSLSASVGDRVTITCRTSQSISMYLNWYQQRPGTAPNLLIYAASSLQSGVPTRFSGSGSGTDFTLTISSLQPEDSATYYCQQSYGNPYTFGQGTKLEIK

SEQ ID NO: 18855 - protein, 107 aa, Artificial Sequence
  Synthetic polypeptide representing artificial human antibody VL domain
DIQMTQSPSTLSASVGDRVTMTCRASQSISGFLNWYQQKPGKAPRLLISGATSLESGVPSRFSGSGSGTEFTLTISSLQPEDFATYYCQQSVRAPLSFGGGTKVEIK

SEQ ID NO: 18856 - protein, 110 aa, Artificial Sequence
  Synthetic polypeptide representing artificial human antibody VL domain
QSALTQPASVSGSPGQSITISCTGTSSDVGGYNYVSWYQQHPGKAPKLMIYDVSDRPSGVSHRFSGSKSGTTASLTISGLQAEDEADYYCSSYTSSTTLVFGTGTKVTVL

SEQ ID NO: 18857 - protein, 107 aa, Artificial Sequence
  Synthetic polypeptide representing artificial human antibody VL domain
EIVLTQSPATLSLSPGERATLSCRASQSVSSYLAWYQQKPGQAPRLLIYDASNRATGIPARFSGSGSGTDFTLTISSLEPEDFAVYYCQQRSNWPLTFGGGTKVEIK

SEQ ID NO: 18858 - protein, 107 aa, Artificial Sequence
  Synthetic polypeptide representing artificial human antibody VL domain
AIQMTQSPSSLSASVGDRVTITCRASQGIRNDLGWYQQKPGKAPKLLIYAASSLQSGVPSRFSGSGSGTDFTLTISSLQPEDFATYYCLQDYNYPRTFGQGTKVEIK

SEQ ID NO: 18859 - protein, 107 aa, Artificial Sequence
  Synthetic polypeptide representing artificial human antibody VL domain
EIVLTQSPATLSLSPGERATLSCRASQSVGSFLGWYQQKVGQAPRLLIYDASNRATGIPARFSGSGSGTDFTLTISSLEPEDFAVYYCQQRSSWPLTFGGGTKVEIK

SEQ ID NO: 18860 - protein, 112 aa, Artificial Sequence
  Synthetic polypeptide representing artificial human antibody VL domain
DVVMTQSPLSLPVTLGQPASISCRSSQSLVYSDGNTYLNWFQQRPGQSPRRLIYKVSNRDSGVPDRFSGSGSGTDFTLKISRVEAEDVGVYYCMQGTHWPYTFGQGTKLEIK

SEQ ID NO: 18861 - protein, 109 aa, Artificial Sequence
  Synthetic polypeptide representing artificial human antibody VL domain
SSELTQDPAVSVALGQTVRITCQGDSLRSYYASWYQQKPGQAPVLVIYGKNNRPSGIPDRFSGSSSGNTASLTITGAQAEDEADYYCNSRDSSGNHNYVFGTGTKVTVL

SEQ ID NO: 18862 - protein, 110 aa, Artificial Sequence
  Synthetic polypeptide representing artificial human antibody VL domain
QSALTQPRSVSGSPGQSVTISCTGTSSDVGGYNYVSWYQQHPGKAPKLMIYDVSKRPSGVPDRFSGSKSGNTASLTISGLQAEDEADYYCCSYAGSYTWVFGGGTKLTVL

SEQ ID NO: 18863 - protein, 112 aa, Artificial Sequence
  Synthetic polypeptide representing artificial human antibody VL domain
DVVMTQSPLSLPVTLGQPASISCRSSQSLVYSDGNTYLNWFQQRPGQSPRRLIYKVSNRDSGVPDRFSGSGSGTDFTLKISRVEAEDVGVYYCMQGTHWPLTFGGGTKVEIK

SEQ ID NO: 18864 - protein, 111 aa, Artificial Sequence
  Synthetic polypeptide representing artificial human antibody VL domain
QSALTQPRSVSGSPGQSVTISCSGSSSDVGAYIYVSWYQQHPGKAPKFIIYDVNKRPSGVPDRFSGSKSGNTASLTISGLQAEDEADYYCCSYAGTYTSVLFGGGTKLTVL

SEQ ID NO: 18865 - protein, 111 aa, Artificial Sequence
  Synthetic polypeptide representing artificial human antibody VL domain
QSVLTQPPSVSGAPGQRVTIHCTGGSSNIGARYDVYWYRQLPGTAPKLLIYGNNNRPSGVPDRFSGSKSGTSASLAITGLQAEDEADYYCQSYDSRLSGWVFGGGTKLTVL

SEQ ID NO: 18866 - protein, 107 aa, Artificial Sequence
  Synthetic polypeptide representing artificial human antibody VL domain
DIQMTQSPSSVSASVGDRVTITCRASQGINNWLAWYQHKPGKIPKLLISAASNLRGGIPSRFNGSGSGTDFTLTISSLQPEDFATYYCQQGHSFPLTFGGGTKVEIK

SEQ ID NO: 18867 - protein, 110 aa, Artificial Sequence
  Synthetic polypeptide representing artificial human antibody VL domain
QSVLTQPPSVSAAPGQKVTISCSGSSSNIGKNYVCWYQQLPGTAPKALIYDNYRRPLGIPDRFSGSKSGTSATLAITGLQTGDEADYFCGTWDSSLNAVLFGGGTKLTVL

SEQ ID NO: 18868 - protein, 110 aa, Artificial Sequence
  Synthetic polypeptide representing artificial human antibody VL domain
QSALTQPPSASGSPGQSVTISCTGTSSDVGGYNYVSWYQQHPGKTPKLIIYEVTQRPSGVPNRFSGSKSGNTASLTVSGLQAEDEADYYCSSYADTYTYVFGTGTKVTVL

SEQ ID NO: 18869 - protein, 106 aa, Artificial Sequence
  Synthetic polypeptide representing artificial human antibody VL domain
DIQMTQSPSTLSASVGDRVTITCRASQSISSWLAWYQQKPGKAPKLLIYKASTLESGVPSRFSGSGSGTEFTLTISSLQPDDFATYFCQQYSTSKTFGQGTKVEIK

SEQ ID NO: 18870 - protein, 107 aa, Artificial Sequence
  Synthetic polypeptide representing artificial human antibody VL domain
EIVLTQSPATLSLSLGERATLSCRASHSISGYVAWYQQKSGQAPRLLIYDTSRPVTGIPVRFSGSGSGTQFTLTISSLEPDDFAVYYCQQRSHWPPTFGQGTRLDIK

SEQ ID NO: 18871 - protein, 110 aa, Artificial Sequence
  Synthetic polypeptide representing artificial human antibody VL domain
QSALTQPPSASGSPGQSVTISCTGTSSDVGGYNYVSWYQQHPGKAPKLLIYEVTQRPSGVPNRFSGSKSGNTASLTVSGLQAEDEADYYCSSYADTYNYVFGTGTKVTVL

SEQ ID NO: 18872 - protein, 107 aa, Artificial Sequence
  Synthetic polypeptide representing artificial human antibody VL domain
DIQMTQSPSTLSVSVGDRVTITCRASQNINNWLAWYQQKPGKAPKFLIYKASRLEGGVPSRFSGSGSGADFTLTISSLQPDDFGTYYCQQYNTYPWTFGQGTKVEIK

SEQ ID NO: 18873 - protein, 111 aa, Artificial Sequence
  Synthetic polypeptide representing artificial human antibody VL domain
QSALTQPASVSGSPGQSITISCTGTSSDVGGYNYVSWYQQHPGKAPKLMIYDVSNRPSGVSNRFSGSKSGNTASLTISGLQAEDEADYYCSSYTSSSTPVVFGGGTKLTVL

SEQ ID NO: 18874 - protein, 110 aa, Artificial Sequence
  Synthetic polypeptide representing artificial human antibody VL domain
QSVLTQPPSASGAPGQRVSISCSGNASNIGSNLVYWYQQFPGTAPKLLIYYTDQRPSGVPGRFSGSKSGTSASLAVTGLRSEDEADYYCASYDATLRGYVFGTGTKVTVL

SEQ ID NO: 18875 - protein, 110 aa, Artificial Sequence
  Synthetic polypeptide representing artificial human antibody VL domain
QSVLTQPPSVSGAPGQRVTISCTGSSSNIGAGYDVHWYQQLPGTAPKLLIYGNSNRPSGVPDRFSGSKSGTSASLAITGLQAEDEADYYCQSYDSSLSVVFGGGTKLTVL

SEQ ID NO: 18876 - protein, 113 aa, Artificial Sequence
  Synthetic polypeptide representing artificial human antibody VL domain
DIVMTQSPDSLAVSLGERATINCKSSQSVLYSSNNKNYLAWYQQKPGQPPKLLIYWASTRESGVPDRFSGSGSGTDFTLTISSLQAEDVAVYYCQQYYSTPYTFGQGTKLEIK

SEQ ID NO: 18877 - protein, 110 aa, Artificial Sequence
  Synthetic polypeptide representing artificial human antibody VL domain
QSVLTQPPSASGTPGQRVTISCSGSSSNIGSNTVNWYQQLPGTAPKLLIYSNNQRPSGVPDRFSGSKSGTSASLAISGLQSEDEADYYCAAWDDSLNGPVFGRGTKLTVL

SEQ ID NO: 18878 - protein, 108 aa, Artificial Sequence
  Synthetic polypeptide representing artificial human antibody VL domain
EIVMTQSPATLSVSPGERVILSCRASRSVNRNLAWYQQRPGQPPRLLIYEASTRATAIPARFSGSGFGTDFTLTISSLQSEDFAIYYCQQYNNWPPLTFGGGTKVEIK

SEQ ID NO: 18879 - protein, 108 aa, Artificial Sequence
  Synthetic polypeptide representing artificial human antibody VL domain
SSELTQDPAVSVALGQTVRITCQGDSLRSYYASWYQQKPRQAPILVIYGKNNRPSGIPDRFSGSYSGSTASLLITGAQADDEADYYCNSRDSSGNHRVFGRGTTVTVL

SEQ ID NO: 18880 - protein, 107 aa, Artificial Sequence
  Synthetic polypeptide representing artificial human antibody VL domain
DIQLTQSPSFLSASVGDRVTITCRASQGISTSLAWYQQNPGKAPNFLLCTSSILQSGAPARFRASGSGTEFTLTITSLQPEDFATYYCQQLNTYPLTFGGGTKVEIK

SEQ ID NO: 18881 - protein, 108 aa, Artificial Sequence
  Synthetic polypeptide representing artificial human antibody VL domain
SYELTQPPSVSVSPGQTARITCSGDALPKQYAYWYQQKPGQAPVVVIYKDSERPSGIPERFSGSSSGTTVTLTISGVQAEDEADYYCQSADSSGTYVVFGGGTKLTVL

SEQ ID NO: 18882 - protein, 106 aa, Artificial Sequence
  Synthetic polypeptide representing artificial human antibody VL domain
SYELTQPPSVSVSPGQTASITCSGDKLGDKYACWYQQKPGQSPVLVIYQDSKRPSGIPERFSGSNSGNTATLTISGTQAMDEADYYCQAWDSSGVVFGGGTKLTVL

SEQ ID NO: 18883 - protein, 110 aa, Artificial Sequence
  Synthetic polypeptide representing artificial human antibody VL domain
QSVLTQPPSVSAAPGQKVTISCSGSSSNIGNNYVSWYQQLPGTAPKLLIYDNNKRPSGIPDRFSGSKSGTSATLGITGLQTGDEADYYCGTWDSSLSVWVFGGGTKLTVL

SEQ ID NO: 18884 - protein, 108 aa, Artificial Sequence
  Synthetic polypeptide representing artificial human antibody VL domain
SSELTQDPAVSVALGQTVRITCQGDNLKLFYTDWYQQKPGQAPLLVIHGKNNRPSGIPDRFSGSSSAYTTSLTIIGAQAEDEADYYCSSRDRSGDRVIFGGGTKVTVL

SEQ ID NO: 18885 - protein, 108 aa, Artificial Sequence
  Synthetic polypeptide representing artificial human antibody VL domain
DIEMTQSPSSLSASVGDRVTITCRASQSISTYLNWYQQKPGKAPRLLIHAASSLQSGVPSRFTGSGSGTDFTLTIISLQPEDFATYYCQQSFSTPRVTFGGGTKVDIK

SEQ ID NO: 18886 - protein, 110 aa, Artificial Sequence
  Synthetic polypeptide representing artificial human antibody VL domain
QSVLTQPPSASGTPGQRVTISCSGSSSNIGSNYVYWYQQLPGTAPKLLIYRNNQRPSGVPDRFSGSKSGTSASLAISGLRSEDEADYYCAAWDDSLSGVVFGGGTKLTVL

SEQ ID NO: 18887 - protein, 110 aa, Artificial Sequence
  Synthetic polypeptide representing artificial human antibody VL domain
QSALTQPASVSGSPGQSITISCAGTWTDIGLFNHVSWYQQHPGKAPKLIIYDVTERPSGVSNRFSASKSGNTASLSISGLQTEDEADYYCNSYTITGAYVFGTGTEVTVL

SEQ ID NO: 18888 - protein, 108 aa, Artificial Sequence; identical to SEQ ID NO: 18838
  Synthetic polypeptide representing artificial human antibody VL domain

SEQ ID NO: 18889 - protein, 108 aa, Artificial Sequence
  Synthetic polypeptide representing artificial human antibody VL domain
SSELTQDPAVSVALGQTVRITCQGDSLRIYYASWYQQKPGQAPILVIYGKNNRPSGIPDRFSGSTSLSTASLTITGAQAADEADYFCSSRDSSDHLLVFGGGTRLTVL

SEQ ID NO: 18890 - protein, 107 aa, Artificial Sequence
  Synthetic polypeptide representing artificial human antibody VL domain
EIVLTQSPATLSLSPGERATLSCRASQSVSSYLAWYQQKPGQAPRLLIYDASNRATGIPARFSGSGSGTDFTLTISSLEPEDFAVYYCQQRSNWPFTFGPGTKVDIK

SEQ ID NO: 18891 - protein, 108 aa, Artificial Sequence
  Synthetic polypeptide representing artificial human antibody VL domain
SSELTQDPAVSVALGQTVRITCQGDSLKLFYTNWYQQKPGQAPVLVIHGKNSRPSGIPDRFSGSSSGYTTSLTIIGAQAEDEADYYCSSRDRSGDHVIFGGGTKVTVL

SEQ ID NO: 18892 - protein, 108 aa, Artificial Sequence
  Synthetic polypeptide representing artificial human antibody VL domain
SYELTQPPSVSVSPGQTARITCSGDALPKQYAYWYQQKPGQAPILVIYKDSERPSGIPERFSGSSSGTTVTLTISGVQAEDEAEYYCQSADNSDTYQVFGGGTKLTVL

SEQ ID NO: 18893 - protein, 113 aa, Artificial Sequence
  Synthetic polypeptide representing artificial human antibody VL domain
DIVMTQSPDSLAVSLGERATINCKSSQSVLYSSNNKNYLAWYQQKPGQPPKLLIYWASTRESGVPDRFSGSGSGTDFTLTISSLQAEDVAVYYCQQYYSTPLTFGGGTKVEIK

SEQ ID NO: 18894 - protein, 106 aa, Artificial Sequence
  Synthetic polypeptide representing artificial human antibody VL domain
SYELTQPPSVSVSPGQTATITCSGDVLPKQHAYWYQQKPGQGPVLVIYRDTERPSGIPERFSGSSSGTTVTLTISGVQAEDEADYYCQSADISGRVFGGGTKLTVL

SEQ ID NO: 18895 - protein, 107 aa, Artificial Sequence
  Synthetic polypeptide representing artificial human antibody VL domain
DIQMTQSPPSLSASVGDRVTITCRASQSINRYLNWYRQTPGKAPKLLIFSASSLQVGVPSRFSGSGSGTDFTLTISSLQPEDFATYYCQQSYSTPLTFGSGTRVDIK

SEQ ID NO: 18896 - protein, 107 aa, Artificial Sequence
  Synthetic polypeptide representing artificial human antibody VL domain
SYEVTQAPSVSVFPGQTLTITCSGDKLGDKYASWYQQKPGQSPVVVIYHNTMRPSGIPERFSGSNSGNTATLTIDGTQAMDEAVYFCQAWDTISHVVLGGGTKVTVL

SEQ ID NO: 18897 - protein, 107 aa, Artificial Sequence
  Synthetic polypeptide representing artificial human antibody VL domain
EIVLTQSPATLSLSPGERATLSCRASQSVSTYLAWYQQKPGQAPRLLIYDASNRATGIPARFSGSGSGTDFTLTISSLEPEDFAVYHCQQRSNWPPTFGQGTKVEIK

SEQ ID NO: 18898 - protein, 107 aa, Artificial Sequence
  Synthetic polypeptide representing artificial human antibody VL domain
DIQMTQSPSSLSASVGDRVTITCRASQKIATYLNWYQQKPGKAPKLLIFEASTLHTGVPSRFSGGGSGTDFTLSISSLQPEDFATYYCQQSYRTPITFGQGTRLEIK

SEQ ID NO: 18899 - protein, 105 aa, Artificial Sequence
  Synthetic polypeptide representing artificial human antibody VL domain
EIVLTQSPGTLSLSPGERATLSCRASQSVNSDYLAWYQQKPGQAPRLLIYGASSRAIGIPDRFSGSGSGTDFTLTISRLEPEDFAVYYCQLYGNTFGGGTKVEIK

SEQ ID NO: 18900 - protein, 108 aa, Artificial Sequence
  Synthetic polypeptide representing artificial human antibody VL domain
SSELTQDPAVSVALGQTVRITCQGDSLRIYYATWYQQKPGQAPIVVIYGKNNRPSGIPDRFSGSTSLTTASLTITGAQAEDEADYFCSSRDSSDNLLMFGGGTRLTVL

SEQ ID NO: 18901 - protein, 109 aa, Artificial Sequence
  Synthetic polypeptide representing artificial human antibody VL domain
SSELTQDPAVSVALGQTVRITCQGDSLRSYYASWYQQKPGQAPVLVIYGKNNRPSGIPDRFSGSSSGNTASLTITGAQAEDEADYYCNSRDSSGNLNVVFGGGTKLTVL

SEQ ID NO: 18902 - protein, 108 aa, Artificial Sequence
  Synthetic polypeptide representing artificial human antibody VL domain
SSELTQDPAVSVALGQTVKITCQGDSLTLFYTNWYRQKPGQAPVLVIHGKNNRPSGIPDRFSGSSSAYTTSLTIIGAQAEDEADYYCSSRDRSGDRVIFGGGTKVTVL

SEQ ID NO: 18903 - protein, 110 aa, Artificial Sequence
  Synthetic polypeptide representing artificial human antibody VL domain
QTVVTQEPSFSVSPGGTVTLTCGLSSGSVSTSYYPSWYQQTPGQAPRTLIYSTNTRSSGVPDRFSGSILGNKAALTITGAQADDESDYYCVLYMGSGIWVFGGGTKLTVL

SEQ ID NO: 18904 - protein, 108 aa, Artificial Sequence
  Synthetic polypeptide representing artificial human antibody VL domain
SSELTQDPAVSVALGQTVRITCQGDNLKLFYTNWYQQKPGQAPVLVIHGKNNRPSGIPDRFSGSSSAYTTSLTIIGAQAEDEADYYCNSRDRSGDRVIFGGGTKVTVL

SEQ ID NO: 18905 - protein, 113 aa, Artificial Sequence
  Synthetic polypeptide representing artificial human antibody VL domain
DIVMTQSPDSLTVSLGERATITCKSSQSILYNSNSKNYLAWYQQKSGQPPKLLISWASTREFGAPDRFSGSGSGTDFTLTVNNLQAEDVAVYFCQQYYTIPYTFGQGTKLEIK

SEQ ID NO: 18906 - protein, 110 aa, Artificial Sequence
  Synthetic polypeptide representing artificial human antibody VL domain
QSALTQPASVSGSPGQSITISCTGTNSDVGTYNFVSWYQQHPGKAPKLIILDVSDRPSGVSFRFSGSKSGNTASLTISGLQAEDEADYYCSSYTSSSTLIFGGGTKLTVL

SEQ ID NO: 18907 - protein, 110 aa, Artificial Sequence; identical to SEQ ID NO: 18875
  Synthetic polypeptide representing artificial human antibody VL domain

SEQ ID NO: 18908 - protein, 108 aa, Artificial Sequence
  Synthetic polypeptide representing artificial human antibody VL domain
SYELTQPPSVSVSPGQTARITCSGDALPKQYAYWYQQKPGQAPVLVIYKDSERPSGIPERFSGSSSGTTVTLTISGVQAEDEADYYCQSADSSGTYWVFGGGTKLTVL

SEQ ID NO: 18909 - protein, 110 aa, Artificial Sequence
  Synthetic polypeptide representing artificial human antibody VL domain
QSVLTQPPSVSGAPGQRVTISCTGSGSNIGATYDVHWYQQLPGTAPKLLIFGNTNRPSGVPDRFSGSKSGTSASLAITGLQAEDEGDYYCQSYDSTLSAVFGGGTKLTVL

SEQ ID NO: 18910 - protein, 110 aa, Artificial Sequence
  Synthetic polypeptide representing artificial human antibody VL domain
QSALTQPASVSGSPGQSITISCTGASDSVGGYNYVSWYQHHPGKVPKLLINDVSQRPSGVSLRFSGSKSGNTAYLAISGLQAEDEADYYCSSYTSRSTLVFGGGTKLTVL

SEQ ID NO: 18911 - protein, 110 aa, Artificial Sequence; identical to SEQ ID NO: 18791
  Synthetic polypeptide representing artificial human antibody VL domain

SEQ ID NO: 18912 - protein, 107 aa, Artificial Sequence
  Synthetic polypeptide representing artificial human antibody VL domain
DIQMTQSPSSLSASVGDRVTITCRASQSIATYLNWYQQKPGKAPNLLIYEASTLHTEVPSRFSGSGSGTDFTLTISSLQPEDFATYYCQQSYSTPITFGQGTRLEIK

SEQ ID NO: 18913 - protein, 109 aa, Artificial Sequence
  Synthetic polypeptide representing artificial human antibody VL domain
EIVLTQSPATLSLSPGERASLSCRASQSISSNLAWYQLRPGQAPRLLIYDASIRATGIPARFTGSGSGTDFTLTISGLEPEDFALYYCQQRSSWPPRITFGQGTRLDIK

SEQ ID NO: 18914 - protein, 112 aa, Artificial Sequence; identical to SEQ ID NO: 18835
  Synthetic polypeptide representing artificial human antibody VL domain

SEQ ID NO: 18915 - protein, 108 aa, Artificial Sequence
  Synthetic polypeptide representing artificial human antibody VL domain
SSELTQDPAVSVALGQTVKITCQGDSLRLFYTNWYQQKPGQAPVLVIHGKNSRPSGIPDRFSGSSSGYTASLTIIGAQAEDEADYYCSSRDRSGDHVIFGGGTKVTVL

SEQ ID NO: 18916 - protein, 106 aa, Artificial Sequence
  Synthetic polypeptide representing artificial human antibody VL domain
SYELTQPPSVSVSPGQTASVTCSGEGLGAKYVSWYQQKPGQSPVMVIYQDTKRPSGIPERFSGSNSGNIATLTISGTQAMDEADYYCQSWDSITGVFGGGTKLTVL

SEQ ID NO: 18917 - protein, 108 aa, Artificial Sequence
  Synthetic polypeptide representing artificial human antibody VL domain
SSELTQDPAVSVALGQTVRITCQGDSLKLFYTNWYQQKPGQAPVLVIHGKNNRPSGIPDRFSGSSSGYTSSLTIIGAQAEDEADYYCSSRDRSGDRVLFGGGTKVTVL

SEQ ID NO: 18918 - protein, 108 aa, Artificial Sequence
  Synthetic polypeptide representing artificial human antibody VL domain
SSELTQDPAVSVALGQTVRITCQGDTLTLYYINWYQQKPGQAPVLVIHGKNNRPSGIPDRFSASSSGSTASLTIIGAQADDEADYYCNSRDRSGDHVVFGGGTKLTVL

SEQ ID NO: 18919 - protein, 109 aa, Artificial Sequence
  Synthetic polypeptide representing artificial human antibody VL domain
EIVLTQSPGTLSLSPGERATLSCRASQSVSSGYLAWYQQKPGQVPRLLIYAASSRATGTPDRFSGSGSGTDFTLTITRLEPEDFAVYYCQQYGSSPLFTFGPGTKVDIK

SEQ ID NO: 18920 - protein, 108 aa, Artificial Sequence
  Synthetic polypeptide representing artificial human antibody VL domain
SSELTQDPAVSVALGQTVRITCQGDSLKLFYTNWYQQKPGQAPLLVIHGKNTRPSGIPDRFSGSSSGYSASLTIIGAQAEDEADYYCSSRDRSGDLVLFGGGTKVTVL

SEQ ID NO: 18921 - protein, 110 aa, Artificial Sequence
  Synthetic polypeptide representing artificial human antibody VL domain
QSALTQPPSASGSPGQSVTISCTGTSSDVGGYNYVSWYQQHPGKAPKLMIYEVSKRPSGVPDRFSGSKSGNTASLTVSGLQAEDEADYYCGSYTGSNKNVFGTGTKVTVL

SEQ ID NO: 18922 - protein, 110 aa, Artificial Sequence
  Synthetic polypeptide representing artificial human antibody VL domain
NFMLTQPHSVSASPGKTVTISCTRSNGGIASNYVQWYQQRPGSAPTIVIYEDSQRPSGVPDRFSASIDSSSNSASLTISALKPEDEADYYCQSYDRTNVIFGGGTKLTVL

SEQ ID NO: 18923 - protein, 107 aa, Artificial Sequence
  Synthetic polypeptide representing artificial human antibody VL domain
SYELTQPPSVSVSPGQTASITCSGDKLGNKYANWYQQKPGQSPILVIYQDTKRPSGIPERFSGSNSGNTATLTISGTQALDEADYYCQAWESSTVVVFGGGTNLTVL

SEQ ID NO: 18924 - protein, 109 aa, Artificial Sequence
  Synthetic polypeptide representing artificial human antibody VL domain
QSVLTQPPSVSAAPGQKVTISCSGSSSNIGNNYVSWYQQLPGTAPKLLIYDNNKRPSGIPDRFSGSKSGTSATLGITGLQTGDEADYYCGTWDSSLSALFGGGTKLTVL

SEQ ID NO: 18925 - protein, 110 aa, Artificial Sequence
  Synthetic polypeptide representing artificial human antibody VL domain
QSALTQPASVSGSPGQSITISCTGTSSDVGSYNLVSWYQQHPGKAPKLMIYEVSKRPSGVSNRFSGSKSGNTASLTISGLQAEDEADYYCCSYAGSSTLVFGGGTKLTVL

SEQ ID NO: 18926 - protein, 109 aa, Artificial Sequence
  Synthetic polypeptide representing artificial human antibody VL domain
EIVLTQSPGTLSLSPGERATLSCRASQSVSSSYLAWYQQKPGQAPRLLIYGASSRATGIPDRFSGSGSGTDFTLTISRLEPEDFAVYYCQQYGSSLPITFGQGTRLEIK

SEQ ID NO: 18927 - protein, 108 aa, Artificial Sequence
  Synthetic polypeptide representing artificial human antibody VL domain
SSELTQDPAVSVALGQTVTITCQGDNLKLFYTNWYQQKPGQAPVLVIHGKNSRPSGIPDRFSGSSSGFTTSLTIIGAQAEDEADYYCNSRDRSGDHVIFGGGTKVTVL

SEQ ID NO: 18928 - protein, 111 aa, Artificial Sequence
  Synthetic polypeptide representing artificial human antibody VL domain
DIHLTQSPSFLSASVGDRVTITCRASQHMSGYFAWYQQKPGRAPKLLIYAASQLQSGVPSRVPSRFSGSASGTEFTLTINTLQPEDFATYYCQQFDSYPLTFGGGTTIEIK

SEQ ID NO: 18929 - protein, 114 aa, Artificial Sequence
  Synthetic polypeptide representing artificial human antibody VL domain
DIVMTQSPDSLAVSLGERATINCRSSQSLLYRSNNKNYLAWYQQKPGQAPKLLINWASTRESGVPDRFSGSGSGTDFTLTISSLQAEDVAVYYCQQYYTTPGITFGPGTKVHIK

SEQ ID NO: 18930 - protein, 110 aa, Artificial Sequence
  Synthetic polypeptide representing artificial human antibody VL domain
DIQMTQSPSSLSASVGDRVTITCQASQDISNYLNWYQQKPGKAPKLLIYDASNLETGVPSRFSGSGSGTDFTFTISSLQPEDIATYYCQQYDNLPPNFFTFGPGTKVDIK

SEQ ID NO: 18931 - protein, 107 aa, Artificial Sequence
  Synthetic polypeptide representing artificial human antibody VL domain
DIQMTQSPSSLSASVGDRVTITCRASQKIATYLNWYQQKPGKAPNLLIFEASTLHTGVPSRFSGGGSGTDFTLTISSLQPEDFATYYCQQSYSTPITFGQGTRLEIK

SEQ ID NO: 18932 - protein, 107 aa, Artificial Sequence
  Synthetic polypeptide representing artificial human antibody VL domain
SYELTQPPSVSVSPGQTASITCSADKLGDKYACWYQQKPGQSPVLVIYQDNKRPSGIPERFSGSNSGNTATLTISGTQTMDEADYYCQAWDSSTDVVFGGGTKLTVL

SEQ ID NO: 18933 - protein, 106 aa, Artificial Sequence
  Synthetic polypeptide representing artificial human antibody VL domain
NFMLTQPHSVSESPGKTVTISCTGSSGSIASNYVQWYQQRPGSAPTTVIYEDNQRPSGVPDRFSGSIDSSSNSASLTISGLKTEDEADYYCQSYEVFGGGTKLTVL

SEQ ID NO: 18934 - protein, 110 aa, Artificial Sequence
  Synthetic polypeptide representing artificial human antibody VL domain
QSVLTQPPSVSAAPGQKVTISCSGSSSNIGNNYVSWYQQLPGTAPKLLIYDNNKRPSGIPDRFSGSKSGTSATLGITGLQTGDEADYYCGTWDSSLSAGVFGGGTKLTVL

SEQ ID NO: 18935 - protein, 110 aa, Artificial Sequence
  Synthetic polypeptide representing artificial human antibody VL domain
QSALTQPASVSGSPGQSITISCTGTSSDVGGYNYVSWYQQHPGKAPKLMIYDVSNRPSGVSNRFSGSKSGNTASLTISGLQAEDEADYYCSSYTSSSTLVFGTGTKVTVL

SEQ ID NO: 18936 - protein, 111 aa, Artificial Sequence
  Synthetic polypeptide representing artificial human antibody VL domain
QSVLTQPPSVSGAPGQRVTISCTGSSSSIGAGYDVHWYQQLPGTAPKLLMYANSDRPSGVPDRFSGSKSGTSASLAITGLQAEDEADYYCQSYDNSLSGWVFGGGTKLTVL

SEQ ID NO: 18937 - protein, 111 aa, Artificial Sequence
  Synthetic polypeptide representing artificial human antibody VL domain
QSALTQPASVSGSPGQSITISCTGTSSDVGGYNYVSWYQQHPGKAPKLMIYDVSNRPSGVSNRFSGSKSGNTASLTISGLQAEDEADYYCSSYTSSSTLEVFGGGTKLTVL

SEQ ID NO: 18938 - protein, 108 aa, Artificial Sequence
  Synthetic polypeptide representing artificial human antibody VL domain
EIVLTQSPGTLSLSPGERATLSCRASQSVSITSLAWYQQKPGQAPSLLIYGASSRATGIPHRFSGSGSGTDFTLTISRLEPEDFAVYYCQQYGRSPRTFGQGTKVEIK

SEQ ID NO: 18939 - protein, 110 aa, Artificial Sequence
  Synthetic polypeptide representing artificial human antibody VL domain
QSVLTQPPSASGTPGQRVTISCSGSSSNIGSHYVYWYQQLPGTAPKLLIYRNNQRPSGVPDRFSGSKSGTSASLAISGLRSEDEADYYCAAWDDSLRGLVFGGGTKLTVL

SEQ ID NO: 18940 - protein, 107 aa, Artificial Sequence
  Synthetic polypeptide representing artificial human antibody VL domain
EIVLTQSPGTLSLSPGERATLSCRASQSVSSSYLAWYQQKPGQAPRLLIYGASSRATGIPDRFSGSGSGTDFTLTISRLEPEDFAVYYCQQYGSSYTFGQGTKLEIK

SEQ ID NO: 18941 - protein, 114 aa, Artificial Sequence
  Synthetic polypeptide representing artificial human antibody VL domain
DIVMTQSPDSLAVSLGERATINCKSSQSVLYRSNNKNYLAWYQQKPGQAPKLLIKWASTRESGVPDRFSGSGSGTDFTLTISSLQAEDVAVYYCQQYYSIPGITFGPGTKVHIK

SEQ ID NO: 18942 - protein, 107 aa, Artificial Sequence
  Synthetic polypeptide representing artificial human antibody VL domain
DIQMTQSPSSVSASVGDRVTITCRASQGISSWLAWYQQKPGKAPKLLIYAASSLQSGVPSRFSGSGSGTDFTLTISSLQPEDFATYYCQQANSFPWTFGQGTKVEIK

SEQ ID NO: 18943 - protein, 110 aa, Artificial Sequence
  Synthetic polypeptide representing artificial human antibody VL domain
QSVLTQPPSVSAAPGQKVTISCSGSSSNIGNNYVSWYQQLPGTAPKLLISDNNKRPSGIPDRFSGSKSGTSATLGITGLQTGDEADYYCGTWDSSLSAEVFGGGTKLTVL

SEQ ID NO: 18944 - protein, 106 aa, Artificial Sequence
  Synthetic polypeptide representing artificial human antibody VL domain
EIVLTQSPATLSLSPGERATLSCRASQSVSSYLAWYQQKPGQAPRLLIYDASNRATGIPARFSGSGSGTDFTLTISSLEPEDFAVYYCQQRSNWPTFGGGTKVEIK

SEQ ID NO: 18945 - protein, 107 aa, Artificial Sequence
  Synthetic polypeptide representing artificial human antibody VL domain
DIQMTQSPSSLSASVGDRVTITCRASQGISNYLAWYQQKPGKVPNLLIYAASTLQSGVPSRFSGSGSGTDFTLTISSLQPEDVATYYCQKYNSVPWTFGQGTKVEIK

SEQ ID NO: 18946 - protein, 110 aa, Artificial Sequence
  Synthetic polypeptide representing artificial human antibody VL domain
QSVLTQPPSVSAAPGQKVTISCSGSSSNIGNNYVSWYQQLPGTAPKLLIYDNNKRPSGIPDRFSGSKSGTSATLGITGLQTGDEADYYCGTWDSSLSVVVFGGGTKLTVL

SEQ ID NO: 18947 - protein, 113 aa, Artificial Sequence
  Synthetic polypeptide representing artificial human antibody VL domain
DIVLTQSPDSLAVSLGERATINCRSSRSVFYSSGNKNYLAWYQQKPGQPPKLLIYWASDRESGVPDRFSGSGSGTEFTLTISSLQAEDVAVYYCQQYYSTPLTFGGGTRVEIK

SEQ ID NO: 18948 - protein, 109 aa, Artificial Sequence
  Synthetic polypeptide representing artificial human antibody VL domain
QSVLTQPPSASGTPGQRVTISCSGSSSNIGSNTVNWYQQLPGTAPKLLIYSNNQRPSGVPDRFSGSKSGTSASLAISGLQSEDEADYYCAAWDDSLTYVFGTGTKVTVL

SEQ ID NO: 18949 - protein, 109 aa, Artificial Sequence
  Synthetic polypeptide representing artificial human antibody VL domain
QSALTQPRSVSASPGQSVTISCTGSSSAIGGYNLVSWYQHHPGKAPKLLIYTVDKRPPGVPDRFSGSKSGDMASLTISGLQAEDEADYFCSQSGSDAVLFGGGTKLTVL

SEQ ID NO: 18950 - protein, 106 aa, Artificial Sequence
  Synthetic polypeptide representing artificial human antibody VL domain
SYDLTQPPSVSVLPGQTASITCSGDKLGEKFACWYQQKSGQSPVLVIYQDTKRPSGIPERFSGSNSGNTATLTISGTQAMDEADYYCQVWDYDGVTFGGGTKLTVL

SEQ ID NO: 18951 - protein, 107 aa, Artificial Sequence
  Synthetic polypeptide representing artificial human antibody VL domain
SYELTQPPSVSVSPGQTARITCSGDALPKQYAYWYQQKPGQAPVLVIYKDSERPSGIPERFSGSSSGTTVTLTISGVQAEDEADYYCQSADSSGTWVFGGGTKLTVL

SEQ ID NO: 18952 - protein, 114 aa, Artificial Sequence
  Synthetic polypeptide representing artificial human antibody VL domain
DIVMTQSPDSLAVSLGERATINCKSSQSVLYSSNNKNYLAWYQQKPGQPPKLLISWASTRDSGVPDRFSGSGSGTDFTLTISSLQAEDVAVYYCQQYYSAPGFTFGQGTKLEIK

SEQ ID NO: 18953 - protein, 112 aa, Artificial Sequence
  Synthetic polypeptide representing artificial human antibody VL domain
DIVMTQSPLSLPVTPGEPASISCRSSQSLLHSNGYTLLDWYVQKPGQSPQLVIYMASIRVSGVPDRFSGSGSGTDFTLKISRVEAEDVGVYYCMQARQIPQTFGQGTKLEIK

SEQ ID NO: 18954 - protein, 108 aa, Artificial Sequence
  Synthetic polypeptide representing artificial human antibody VL domain
SSELTQDPAVSVALGQTVRITCQGDSLRIYYASWYQQKPGQAPILVIYGKNNRPSGIPDRFSGSTSLSTASLTITGAQAEDEADYFCSSRDSSDSLLVFGGGTRLTVL

SEQ ID NO: 18955 - protein, 111 aa, Artificial Sequence
  Synthetic polypeptide representing artificial human antibody VL domain
QSALTQPASVSGSPGQSITISCTGTSSDVGGYNYVSWYQQHPGKAPKLMIYDVSKRPSGVSNRFSGSKSGNTASLTISGLQAEDEADYYCSSYTSSSTFRVFGTGTKVTVL

SEQ ID NO: 18956 - protein, 112 aa, Artificial Sequence
  Synthetic polypeptide representing artificial human antibody VL domain
DVVMTQSPLYLPVTLGQPASISCRSSQSLVYSDGNTYLNWFQQRPGQSPRRLIYKVSTRDSGVPDRFSGSGSGTDFTLKISRVEAEDVGLYYCMQGIYWPFTFGPGTKVDIK

SEQ ID NO: 18957 - protein, 107 aa, Artificial Sequence
  Synthetic polypeptide representing artificial human antibody VL domain
SYVLTQPPSVSVAPGKTARITCGGNNIGSKSVHWYQQKPGQAPVLVIYYDSDRPSGIPERFSGSNSGNTATLTISRVEAGDEADYYCQVWDSSSDSVFGTGTKVTVL

SEQ ID NO: 18958 - protein, 106 aa, Artificial Sequence
  Synthetic polypeptide representing artificial human antibody VL domain
EIVMTQSPATLSVSPGARVTLSCRASQSVGSNLAWYQQKPGQAPRLLIYETSTRATGIPARFSGSGSGTEFTLTISSLRSEDFAVYYCQQYNDWWTFGQGTKVEIK

SEQ ID NO: 18959 - protein, 110 aa, Artificial Sequence
  Synthetic polypeptide representing artificial human antibody VL domain
SSELTQDPAVSVALGQTVRITCQGDSLRSYYASWYQQKPGQAPVLVIYGKNNRPSGIPDRFSGSSSGNTASLTITGAQAEDEADYYCNSRDSSGNHLRGVFGTGTKVTVL

SEQ ID NO: 18960 - protein, 112 aa, Artificial Sequence
  Synthetic polypeptide representing artificial human antibody VL domain
DIVMTQSPLSLPVTPGEPASISCRSSQSLLHSNGYNYLDWYLQKPGQSPQLLIYLGSNRASGVPDRFSGSGSGTDFTLKISRVEAEDVGVYYCMQALQTPPAFGGGTKVEIK

SEQ ID NO: 18961 - protein, 112 aa, Artificial Sequence
  Synthetic polypeptide representing artificial human antibody VL domain
DIVMTQSPLSLPVTPGEPASISCRSSQSLLHSNGYNCLDWYLQKPGQSPQLLIYLGSNRASGVPDRFSGSGSGTDFTLKISRVEAEDVGVYYCMQALQTPLTFGGGTKVEIK

SEQ ID NO: 18962 - protein, 105 aa, Artificial Sequence
  Synthetic polypeptide representing artificial human antibody VL domain
EIVLTQSPGTLSASAGTRATLSCRASQSVSSTYLAWYQQKPGQAPRLLISGASTRAAGISDRFSVSGSGTDFTLIINRLEAEDSAVYYCHHSRGPFGQGTKLEIK

SEQ ID NO: 18963 - protein, 110 aa, Artificial Sequence
  Synthetic polypeptide representing artificial human antibody VL domain
QSVLTQSPSASGTPGQRVTISCSGSSSNIGSNPVNWYQQLPGTAPKYLIHNNNQRPSGVPDRFSGSKSGTSASLAISGLQSEDEAQYYCAAWDDSLNGWVFGGGTKLTVV

SEQ ID NO: 18964 - protein, 108 aa, Artificial Sequence
  Synthetic polypeptide representing artificial human antibody VL domain
EIVLTQSPGTLSLSPGERATLSCRAGQSLSSRYLAWYQRKPGQAPRLLIYGASNRATGIPDRFSGSGSGTDFTLTISRLEPEDSAVYYCQQYGSSPLTFGGGTKVEIK

SEQ ID NO: 18965 - protein, 110 aa, Artificial Sequence
  Synthetic polypeptide representing artificial human antibody VL domain
QTVVTQEPSFSVSPGGTVTLSCGLSSGSVSTSHYPSWYQQTPGQAPRTLIYSTNTRSFGVPDRFSGSILGNKAALTITGAQADDESDYYCVLYMGSGIWVFGGGTQLTVL

SEQ ID NO: 18966 - protein, 110 aa, Artificial Sequence
  Synthetic polypeptide representing artificial human antibody VL domain
QSVLTQPPSASGTPGQRVTISCSGSSSNIGSNTVNWYQQLPGTAPKLLIYRNNQRPSGVPGRFSGSKSGTSASLAISGLQSEDEADYYCAAWDDSLSGGVFGGGTKLTVL

SEQ ID NO: 18967 - protein, 107 aa, Artificial Sequence
  Synthetic polypeptide representing artificial human antibody VL domain
SYELTQPPSESVSLGQTASITCSGHNLDEKYVSWYQQKPGQSPVLVMYEDKKRPSGIPARFSGSNSGDTATLTIGWIQTVDEADYYCQAWDSRRTVVFGGGTRLTVL

SEQ ID NO: 18968 - protein, 110 aa, Artificial Sequence
  Synthetic polypeptide representing artificial human antibody VL domain
QSALTQPASVSGSPGQSITISCAGTSSDVGAYNYVSWYQQHPLKAPKLMVYDVNNRSSGVSYRFSGSKSGNTASLTISGLRADDEADYYCTSYTTSGTLVFGTGTKVTVL

SEQ ID NO: 18969 - protein, 110 aa, Artificial Sequence
  Synthetic polypeptide representing artificial human antibody VL domain
QSVLTQPPSASGTPGQRVTISCSGSSSNIGSNYVYWYQQLPGTAPKLLIYRNNQRPSGVPDRFSGSKSGTSASLAISGLRSEDEADYYCAAWDDSLSGPVFGGGTKLTVL

SEQ ID NO: 18970 - protein, 107 aa, Artificial Sequence
  Synthetic polypeptide representing artificial human antibody VL domain
DIQMTQSPSSLAASVGDRVTITCRASQNFYSYLNWYQQTPGKAPKLLISAASTLHSGVPSRFSGSGSGTDFTLTISSLQPEDFATYYCQQTYNIPWTFGQGTKVEIK

SEQ ID NO: 18971 - protein, 108 aa, Artificial Sequence
  Synthetic polypeptide representing artificial human antibody VL domain
SSELTQDPAVSVALGQTVRITCHGDSLRRYYATWYQQKPGQAPVLVVYGKNHRPSGIPDRFSGSSSLNTASLTITGAQAEDEGDYYCYSRDSSGNHGVFGGGTKLTVL

SEQ ID NO: 18972 - protein, 110 aa, Artificial Sequence
  Synthetic polypeptide representing artificial human antibody VL domain
QSALTQPASVSGSPGQSITISCAGTSSDVGAYNYVSWYRQHPGKAPKLMIYDVNNRPSGVSERFSGSKSGNTASLTISGLQADDAADYYCSSYTIRNTLVFGTGTTVTVL

SEQ ID NO: 18973 - protein, 105 aa, Artificial Sequence
  Synthetic polypeptide representing artificial human antibody VL domain
DIQMTQSPSSLSASVGDTVSITCRSSQNIDSYLGWYQQKPGKAPKLLIHPASNLQSGVPSRFRGSGFGTDFTLTISSLQPEDFATYYCQSTYSSAFGQGTKLDIK

SEQ ID NO: 18974 - protein, 110 aa, Artificial Sequence
  Synthetic polypeptide representing artificial human antibody VL domain
QSVLTQPPSASGTPGQRVTISCSGSSSNIGSNTVNWYQQLPGTAPKLLIYSNNQRPSGVPDRFSGSKSGTSASLAISGLQSEDEADYYCAAWDDSLNGPVFGTGTKVTVL

SEQ ID NO: 18975 - protein, 108 aa, Artificial Sequence
  Synthetic polypeptide representing artificial human antibody VL domain
SSELTQDPAVSVALGQTVRITCQGDTLRMYYATWYQQKPGQAPVLVIYGNNNRPSGIPDRFSGSASGSTASLTITGAQAEDEAEYFCNSRDSSGTQVVFGGGTKVTVL

SEQ ID NO: 18976 - protein, 107 aa, Artificial Sequence
  Synthetic polypeptide representing artificial human antibody VL domain
EIVMTQSPAALSVSPGEPATLSCRASQTVNINLAWYQQIPGQAPKLLIYDVSTRAAGIPARFSGSGSATDFTLTISSLQSEDFAVYYCQQYNDWPLTFGGGTKVEIK

SEQ ID NO: 18977 - protein, 108 aa, Artificial Sequence
  Synthetic polypeptide representing artificial human antibody VL domain
DIQMTQSPSSLSASVGDRVTITCQASQDISNYLNWYQQKPGKAPKLLIYDASNLETGVPSRFSGSGSGTDFTFTISSLQPEDIATYYCQQYDNLLPITFGQGTRLEIK

SEQ ID NO: 18978 - protein, 107 aa, Artificial Sequence
  Synthetic polypeptide representing artificial human antibody VL domain
DIQLTQSPSFLSASVGDRVTITCRASQGISRYLAWYQQKPGKAPNLLIYAASTLQSGVPSRFSGSGSGTEFTLTISSLQPEDFATYYCQQLNSYPLTFGGGTKVEIK

SEQ ID NO: 18979 - protein, 111 aa, Artificial Sequence
  Synthetic polypeptide representing artificial human antibody VL domain
QSVLTQPPSASGTPGQRVTISCSGRSSNIGSNFVYWYQQLPGAAPKLLIHSNSLRPSGVPERFSGSKSGTSASLAISGLRSEDEADYFCASWDDSLNGHVVFGGGTKLTVL

SEQ ID NO: 18980 - protein, 112 aa, Artificial Sequence
  Synthetic polypeptide representing artificial human antibody VL domain
DIVMTQTPLSSPVTLGQPASISCRSSQSLVHSDGNTYLSWLQQRPGQPPRLLIYKISNRFSGVPDRFSGSGAGTDFTLKISRVEAEDVGVYYCMQATQIPWTFGQGTKLEIK

SEQ ID NO: 18981 - protein, 105 aa, Artificial Sequence
  Synthetic polypeptide representing artificial human antibody VL domain
SYELTQPPSVSVSPGQTASITCSGDKLGDKYACWYQQKPGQSPVLVIYQDSKRPSGIPERFSGSNSGNTATLTISGTQAMDEADYYCQAWDSSVVFGGGTKLTVL

SEQ ID NO: 18982 - protein, 108 aa, Artificial Sequence
  Synthetic polypeptide representing artificial human antibody VL domain
SSELTQDPAVSVALGQTVRITCQGDSLRSYYASWYQQKPGQAPALVIYGKNSRPSGIPDRFSGSSSGNTASLTITGAQAEDEADYYCNSRDSSGNHLVFGGGTKLTVL

SEQ ID NO: 18983 - protein, 111 aa, Artificial Sequence
  Synthetic polypeptide representing artificial human antibody VL domain
DIVMTQTPLSLSVTPGQPASMSCNSSQSLLHSDGKTYLTWFLQKPGQSPKALINEVSRRCSGVPDRFSGTGSGTDFTLKISRVEAEDVGLYYCLQAVHPWTFGQGTKVEIK

SEQ ID NO: 18984 - protein, 107 aa, Artificial Sequence
  Synthetic polypeptide representing artificial human antibody VL domain
DIQMTQSPSSVSASVGDRVTITCRASQAISSYLAWYQQKPGKVPKLLIYAASTLQSGVPSRFSGSGSGTDFTLTIHSLQPEDVATYYCQKYNGAPFSFGPGTTVDLK

SEQ ID NO: 18985 - protein, 112 aa, Artificial Sequence
  Synthetic polypeptide representing artificial human antibody VL domain
DIVMTQTPLSSPVTLGQPASISCRSNQSLVHSDGNTYLSWLQQRPGQPPRLLIYKISNRFSGVPDRFSGSGAGTDFTLKISRVEAEDVGVYYCTQATQFPHTFGQGTKLEIK

SEQ ID NO: 18986 - protein, 106 aa, Artificial Sequence
  Synthetic polypeptide representing artificial human antibody VL domain
SYDLTQPPSVSVSPGQTATITCSGDKLGDLLASWYQQKPGQSPILVIYQDNKRPSGIPERFSGSNSGSTATLTISGTQAMDDADYYCQAWDSTTVVFGGGTKLTVL

SEQ ID NO: 18987 - protein, 107 aa, Artificial Sequence
  Synthetic polypeptide representing artificial human antibody VL domain
EIVMTQSPATLSVSPGDRATLSCRASQIFNNNLAWYQQKPGQAPRLLIYGASTRATGIPGRFSGSGSGTEFTLTISSLQSEDFAVYYCQQYNEWPLTFGGGTRVQIK

SEQ ID NO: 18988 - protein, 112 aa, Artificial Sequence
  Synthetic polypeptide representing artificial human antibody VL domain
DVVMTQSPLSLPVTLGQPASISCRSSQSLVHSDGNTYLNWFQQRPGQSPRRLIYKVSNRDSGVPDRFSGSGSGTDFSLKISRVEAEDVGVYYCMQGTHWPWTFGQGTKVEIK

SEQ ID NO: 18989 - protein, 110 aa, Artificial Sequence
  Synthetic polypeptide representing artificial human antibody VL domain
QSVLTQPPSVSAAPGQKVTISCSGSSSNIGNNHVSWYQQFPGTAPKILIFGTNKRPSGIPDRFSGSRSGTSATLDITGLQTGDEADYYCETWDSSLNSVLFGGGTKLTVL

SEQ ID NO: 18990 - protein, 107 aa, Artificial Sequence
  Synthetic polypeptide representing artificial human antibody VL domain
DIQMTQSPSSLSASVGDRVTITCRASQSISNYLHWYQQKPGKAPKLLIYAASSLQPGVPSRFSGSGSGTDFTLTISSLQPEDFASYYCQQSYSTLPTFGGGTKVEIK

SEQ ID NO: 18991 - protein, 112 aa, Artificial Sequence
  Synthetic polypeptide representing artificial human antibody VL domain
DIVMTQSPLSLPVTPGEPASISCRSSQSLLHSNGYNYLDWYLQKPGQSPQLLIYLGSNRASGVPDRFSGGGSGTDFTLKISRVEAEDVGVYYCMQALQTPYTFGQGTKLEIK

SEQ ID NO: 18992 - protein, 111 aa, Artificial Sequence
  Synthetic polypeptide representing artificial human antibody VL domain
QSVLTQPPSASGTPGQRVTISCSGSSSNIGSNYVYWYQQLPGTAPKLLIYRNNQRPSGVPDRFSGSKSGTSASLAISGLRSEDEADYYCAAWDDSLSGSVVFGGGTKLTVL

SEQ ID NO: 18993 - protein, 112 aa, Artificial Sequence
  Synthetic polypeptide representing artificial human antibody VL domain
QSVLTQPPSVSAAPGQKVTISCSESSSNIGGNYVSWYQQFPGTAPKLLIYDNNKRASGLPDRFSGSKSGTTATLGISGLQTGDEADYYCATWDGSVDLGSYVFGTGTKVTVL

SEQ ID NO: 18994 - protein, 111 aa, Artificial Sequence
  Synthetic polypeptide representing artificial human antibody VL domain
QSVLTQPPSVSGAPGQRVTISCTGSSSNIGSGYDVNWYQQLPGTAPKLLIHGNSNRPSGVPARFSGSKSGTSGSLAIAGLQAEDEADYYCQSYDSSLGGPVFGGGTRVTVL

SEQ ID NO: 18995 - protein, 112 aa, Artificial Sequence
  Synthetic polypeptide representing artificial human antibody VL domain
DVVMTQSPLSLPVTLGQPASISCRSSQSLVHSDGNTYLNWFQQRPGQSPRRLIYKVSNRDSGVPDRFSGSGSGTDFTLKISRVEAEDVGVYYCMQGSHWPLTFGGGTKVEIK

SEQ ID NO: 18996 - protein, 108 aa, Artificial Sequence
  Synthetic polypeptide representing artificial human antibody VL domain
SYELTQPPSVSVSPGQTARITCSGDALPKQYAYWYQQKPGQAPVLVIYKDSERPSGIPERFSGSSSGTTVTLTISGVQAEDEADYYCQSADSSGTYLVFGGGTKLTVL

SEQ ID NO: 18997 - protein, 111 aa, Artificial Sequence
  Synthetic polypeptide representing artificial human antibody VL domain
QSVLTQPPSASGTPGQRVTISCSGSSSNIGSNSVSWFQQLPGTAPKLLIYSNDQRPSGVPARFSGSRSGTSASLAISGLQPEDEAVYYCAAWDDSLNGSNVFGTGTTVTVL

SEQ ID NO: 18998 - protein, 107 aa, Artificial Sequence
  Synthetic polypeptide representing artificial human antibody VL domain
SYEVTQPPSVSVSPGQTASITCSGGQLADKYASWYQQKPGQSPLLVIFQDYKRPSGIPERFSGSKSGNTVTLTISGTQAMDEADYYCQTWDSRNGGVFGTGTKVTVL

SEQ ID NO: 18999 - protein, 114 aa, Artificial Sequence
  Synthetic polypeptide representing artificial human antibody VL domain
DIVMTQSPDSLAVSLGERATINCKSSQSVLSSSNNKNYLAWYQQKPRQPPKLLIYWASTRESGVPDRFSGSGSGTDFTLTISSLQAEDVAVYYCQQYYITLALTFGGGTKVEIK

SEQ ID NO: 19000 - protein, 107 aa, Artificial Sequence
  Synthetic polypeptide representing artificial human antibody VL domain
DIQMTQSPSSLAASVGDRVTITCRASQSIDIFINWYQKKPGKAPKLLIYAASTLQSGVPSRFSGGGSGTDFTLSISNLQADDFAAYYCQQSHSTPMTFGQGTKLDIK

SEQ ID NO: 19001 - protein, 108 aa, Artificial Sequence
  Synthetic polypeptide representing artificial human antibody VL domain
EIVLTQSPGTLSLSPGERATLSCRASQSVSSSYFAWYQQKPGQAPRLLIYAASSRATGIPDRISGSGSGTDFTLTISRLEPEDFAVYYCQQYGTSPYTFGQGTKLQIK

SEQ ID NO: 19002 - protein, 107 aa, Artificial Sequence
  Synthetic polypeptide representing artificial human antibody VL domain
DIQMTQSPSTLSASVGDRVTITCRASQSISSWLAWYQQKPGKAPKLLIYKASSLESGVPSRFSGSGSGTEFTLTISSLQPDDFATYYCQQYNSYPRTFGQGTKVEIK

SEQ ID NO: 19003 - protein, 111 aa, Artificial Sequence
  Synthetic polypeptide representing artificial human antibody VL domain
DIVMTQTPLSLSVTPAQPASISCKSSQSLLHSDGRTYLYWYLQRPGQSPQLLIYEVSNRFSGVPDRFSGSGSGTDFTLNISRVEAEDFGVYYCMQGTYLRTFGLGTKVEIK

SEQ ID NO: 19004 - protein, 107 aa, Artificial Sequence
  Synthetic polypeptide representing artificial human antibody VL domain
EIVVTQSPVTLSTSPGERATLSCRASQSVGSDLAWYQQKPGQAPRLLIYGASTRATGVPVRFSGSGSGTDFTLTISSPQSEDVGVYYCQHYHGWPLTFGGGTKVDIK

SEQ ID NO: 19005 - protein, 107 aa, Artificial Sequence
  Synthetic polypeptide representing artificial human antibody VL domain
DIQMTQSPSSLSASVGDRVTITCRASENINNFVNWYQQKPGKAPKLLIYAASGLQSGVPSRFSGGGSGTHFTLTISSLQPEDFAVYSCQQSLTIPLTFGGGTKVEIK

SEQ ID NO: 19006 - protein, 110 aa, Artificial Sequence
  Synthetic polypeptide representing artificial human antibody VL domain
QSVLTQPPSASGTPGQRVTISCSGSSSNIGSNTVNWYQQLPGTAPKLLIYSNNQRPSGVPDRFSGSKSGTSASLAISGLQSEDEADYYCAAWDDSLNGVVFGGGTKLTVL

SEQ ID NO: 19007 - protein, 108 aa, Artificial Sequence
  Synthetic polypeptide representing artificial human antibody VL domain
SYDLTQPPSVSVSPGQTARITCSGDALTKQYGYWYQQKPGQAPILLIYKDTERPSGIPERFSGSSSGTTVTLTISGVEAADEADYYCQSADTSGSPVVFGGGTKLTVL

SEQ ID NO: 19008 - protein, 107 aa, Artificial Sequence
  Synthetic polypeptide representing artificial human antibody VL domain
AIQMTQFPSSLSASVGDRVTITCRASQGIRDDLGWYQQKPGKAPNLLIYTASNLQGGVPSRFSGSGFGTEFTLTISSLQPEDFATYYCLQHYNYPYTFGQGTKLQIK

SEQ ID NO: 19009 - protein, 106 aa, Artificial Sequence
  Synthetic polypeptide representing artificial human antibody VL domain
SYELTQPPSVSVSPGQTATITCSGDALPKQYAYWYQQKPGQAPVLVIYKDSERPSGIPERFSGSSSGTTVTLTISGVQAEDEADYYCQSADSSGTVFGGGTKLTVL

SEQ ID NO: 19010 - protein, 110 aa, Artificial Sequence
  Synthetic polypeptide representing artificial human antibody VL domain
QSVLTQPPSVSGAPGQRVTISCTGSSSNIGAGYDVHWFQQLPGTAPKLLIYVTNKRPSGVPDRFSGSKSGTSASLAITGLQPEDEADYYCQSYDITLSFVFGTGTKVTVL

SEQ ID NO: 19011 - protein, 108 aa, Artificial Sequence
  Synthetic polypeptide representing artificial human antibody VL domain
EIVLTQSPGTLSLSPGERATLSCRASQSVSSSYLAWYQQKPGQAPRLLIYGASSRATGIPDRFSGSGSGTDFTLTISRLEPEDFAVYYCQQYGSSPLTFGGGTKVEIK

SEQ ID NO: 19012 - protein, 109 aa, Artificial Sequence
  Synthetic polypeptide representing artificial human antibody VL domain
SYVLTQPPSLSVAPEETANIPCGGKSIGSKNVHWYQQRPGQAPLLVIRYDSDRPSGIPARFSGSNSGNTATLTISSVEAADEAVYYCQMWDPFGDHPVVFGGGTRLTVL

SEQ ID NO: 19013 - protein, 107 aa, Artificial Sequence
  Synthetic polypeptide representing artificial human antibody VL domain
DIQLTQSPSSLSASVGDRVTITCRASQGISSYLAWYQQKPGKAPKLLIYAASTLQSGVPSRFSGSGSGTDFTLTISSLQPEDFATYYCQQLNSYPITFGQGTRLEIK

SEQ ID NO: 19014 - protein, 107 aa, Artificial Sequence
  Synthetic polypeptide representing artificial human antibody VL domain
EILMTQSPVTLSVSPGEGVTLSCRTSQTVRSKLSWYQFKPGQAPRLVVYDVSARASGVPARFSGRGSGTEFTLTISGLQSEDFGVYYCQQSDDWPLTFGGGTKVEIK

SEQ ID NO: 19015 - protein, 107 aa, Artificial Sequence
  Synthetic polypeptide representing artificial human antibody VL domain
EIVLTQSPGTLSLSPGERATLSCRASESVSRSYLAWYQQKPGQAPRLLIFGGSSRATGIPDRFSGGGSGTDFTLTISRLEPEDFAVYYCQQYSTSPLFGQGTKLEIK

SEQ ID NO: 19016 - protein, 112 aa, Artificial Sequence
  Synthetic polypeptide representing artificial human antibody VL domain
DIVMTQTPLSSPVTLGQPASISCRSSQSLVHSDGNTYLSWLQQRPGQPPRLLIYKISNRFSGVPDRFSGSGAGTDFTLRISRVEAEDVGVYYCMQATQFPQTFGQGTKVEIK

SEQ ID NO: 19017 - protein, 110 aa, Artificial Sequence
  Synthetic polypeptide representing artificial human antibody VL domain
QTVVTQEPSFSVSPGGTVTLTCGLSSGSVSTSHYPSWYQQTPGQAPRTLIYSTDTRSSGVPDHFSGSILGNKAALTITGAQADDESDYYCVLYMGGGIWVFGGGTKLTVL

SEQ ID NO: 19018 - protein, 108 aa, Artificial Sequence
  Synthetic polypeptide representing artificial human antibody VL domain
SYELTQPPSVSVSPGQTARITCSGDSLPKKYAYWYQQKSGQAPVLVIYEDNKRPSGIPERFSGSSSGTLATLTISGAQVEDEADYYCYSTDSSGNRWVFGGGTKLTVL

SEQ ID NO: 19019 - protein, 107 aa, Artificial Sequence
  Synthetic polypeptide representing artificial human antibody VL domain
DIQMTQSPSSLSASVGDRVTITCRASQSISTYLNWYQQKPGKAPNLLIYGASSLQTGVPSRFTGSGSGTGFTLTINTLQPEDFATYYCQQTYSAPRTFGQGTKVEIK

SEQ ID NO: 19020 - protein, 107 aa, Artificial Sequence
  Synthetic polypeptide representing artificial human antibody VL domain
SYELIQPPSVSVSPGQTANITCSGDGLTRKYVRWFQQKPGQAPVSVIYRDIERPSGIPERFAGSRSGNTVTLTISGAHVDDEADYYCYSWTDNNLGLFGGGTKVTVL

SEQ ID NO: 19021 - protein, 107 aa, Artificial Sequence; identical to SEQ ID NO: 18984
  Synthetic polypeptide representing artificial human antibody VL domain

SEQ ID NO: 19022 - protein, 111 aa, Artificial Sequence
  Synthetic polypeptide representing artificial human antibody VL domain
QSALTQPASVSGSPGQSITISCTGTSSDVGGYNFVSWYQQHPGKAPKLMIYDVSNRPSGVSNRFSGSKSGNTASLTISGLQAEDEADYYCSSYTNSSTLRVFGGGTKLTVL

SEQ ID NO: 19023 - protein, 110 aa, Artificial Sequence
  Synthetic polypeptide representing artificial human antibody VL domain
QSVLTQPPSVSGAPGQRVTISCTGTSSDLGAGYDVHWYQSLPGTAPKLLIYDTNTRPSGVPDRFSGSKSGTSASLAIAGLQAEDEADYFCQSFDSSPQVVFGGGTKLTVL

SEQ ID NO: 19024 - protein, 109 aa, Artificial Sequence
  Synthetic polypeptide representing artificial human antibody VL domain
QTVVTQEPSLTVSPGGTVTLTCASNMGPVTTSYYTNWFQQKPGQRPRALIYTTNKAHSWTPVRFSGSLLGDKAALTVSDVQPEDEADYYCLLFYGGIWMFGGGTKLTVL

SEQ ID NO: 19025 - protein, 112 aa, Artificial Sequence
  Synthetic polypeptide representing artificial human antibody VL domain
DIVMTQSPLSLPVTPGEPASISCRSSQSLLHSNGYNYLDWYLQKPGQSPQLLIYLGSNRASGVPDRFSGSGSGTDFTLKISRVEAEDVGVYYCMQALQTGYTFGQGTKLEIK

SEQ ID NO: 19026 - protein, 108 aa, Artificial Sequence
  Synthetic polypeptide representing artificial human antibody VL domain
SSELTQDPAVSVALGQTVRITCQGDSLRSYYASWYQQKPGQAPVLVIYGKNNRPSGIPDRFSGSSSGNTASLTITGAQAEDEADYYCNSRDSSGNHQVFGGGTKLTVL

SEQ ID NO: 19027 - protein, 110 aa, Artificial Sequence
  Synthetic polypeptide representing artificial human antibody VL domain
QSALTQPASVSGSPGQSITISCTGTSSDVGSYNLVSWYQQHPGKAPKLMIYEGSKRPSGVSNRFSGSKSGNTASLTISGLQAEDEADYYCCSYAGSSTLVFGGGTKLTVL

SEQ ID NO: 19028 - protein, 107 aa, Artificial Sequence
  Synthetic polypeptide representing artificial human antibody VL domain
EIVLTQSPATLSLSPGERATLSCRASRSVSSSLAWYQQKPGQAPRLLIYDASNRATGIPARFSGTGSGTDFTLTISSLEPEDFAVYYCQQRSNWPFTFGPGTKVDIK

SEQ ID NO: 19029 - protein, 107 aa, Artificial Sequence
  Synthetic polypeptide representing artificial human antibody VL domain
DIQMTQSPSSVSASVGDRVTITCRASQGISGWLGWYQQKPGKAPKLLIYAASSLQSGVPSRFSGSGSGTDFTLTISSLQPEDFATYYCQQANSFPYTFGQGTKLEIK

SEQ ID NO: 19030 - protein, 104 aa, Artificial Sequence
  Synthetic polypeptide representing artificial human antibody VL domain
QSALSQPASVSASPGQSVTISCTGARGDDVSWYHLSPGKAPKFLIYDVSVNPSGVSNRFSGSKSGDTASLTISGLQADDEGDYFCSSYEIDSWLFGGGTTLTVL

SEQ ID NO: 19031 - protein, 105 aa, Artificial Sequence
  Synthetic polypeptide representing artificial human antibody VL domain
SYGLTQPPSVSVSPGQTATISCSGYEVGNANTCWYQQKPGQSPVLVIYQNTKRPFGIPERFSGSNSGVTATLTISGIQAPDEAVYYCQAWGSRVVFGGGTKLTVL

SEQ ID NO: 19032 - protein, 107 aa, Artificial Sequence
  Synthetic polypeptide representing artificial human antibody VL domain
DIQMTQSPSVMSASVGDRVTITCRASQDISNYVAWFQQKPGKVPKRLIYVASNLQSGVPARFSGSGSGTEFTLTISSLQPEDFATYYCLQHDSFPRTFGQGTKVEIK

SEQ ID NO: 19033 - protein, 105 aa, Artificial Sequence
  Synthetic polypeptide representing artificial human antibody VL domain
DIQMTQSPSTLSASVGDRITMTCRASQSVSRWLAWYQEKPGKAPKLLIYQASTLQSGVPSRFRGSGSGTDFSLSISSLQPDDFATYYCQQYKTHTFGQGTKVEIK

SEQ ID NO: 19034 - protein, 108 aa, Artificial Sequence
  Synthetic polypeptide representing artificial human antibody VL domain
EIVLTQSPGTLSLSPGERATLSCRASQSVSSNYLAWYQQKPSQAPRLLIYGASSRATGIPDRFSGSGSGTDFTLTISRLEPEDFAVYYCQQSGSSPKTFGQGTKVEIK

SEQ ID NO: 19035 - protein, 110 aa, Artificial Sequence
  Synthetic polypeptide representing artificial human antibody VL domain
QSALTQPPSVSGSLGQSVTISCSGSNSDIYGYARVSWYQQFPGTAPKVLVYEVTNRPSGVPDRFSGSKSGHTASLTISGLQAEDEADYYCASYTTSGTVVFGGGTKLTVL

SEQ ID NO: 19036 - protein, 110 aa, Artificial Sequence; identical to SEQ ID NO: 18969
  Synthetic polypeptide representing artificial human antibody VL domain

SEQ ID NO: 19037 - protein, 108 aa, Artificial Sequence
  Synthetic polypeptide representing artificial human antibody VL domain
EIVLTQSPGTLSLSPGERATLSCRASQSVSSSYLAWYQQKPGQAPRLLIYGASSRATGIPDRFSGSGSGTDFTLTISRLEPEDFAVYYCQQYGSSSLTFGGGTKVEIK

SEQ ID NO: 19038 - protein, 113 aa, Artificial Sequence
  Synthetic polypeptide representing artificial human antibody VL domain
QSVLTQPPSVSGAPGQRVTISCTGSSSNIGAGYDVHWYQQLPGTAPKLLIYGNSNRPSGVPDRFSGSKSGTSASLAITGLQAEDEADYYCQSYDSSLSGWHVVFGGGTKLTVL

SEQ ID NO: 19039 - protein, 110 aa, Artificial Sequence; identical to SEQ ID NO: 19027
  Synthetic polypeptide representing artificial human antibody VL domain

SEQ ID NO: 19040 - protein, 109 aa, Artificial Sequence
  Synthetic polypeptide representing artificial human antibody VL domain
QTVVTQEPSVTVSPGGTVTLTCASNTGTITSLYYASWFQQKPGQPPRPLIYNTQDRHSWTPARFSGFLLGGKAALMLSDVVPEDEADYYCLFYYRASYVFGPGTRVSVL

SEQ ID NO: 19041 - protein, 107 aa, Artificial Sequence
  Synthetic polypeptide representing artificial human antibody VL domain
EIVLTQSPATLSLSPGERATLSCRASQTISSYLAWYQQKPGQAPRLLIYDASNRATGIPARFSGSGSGTDFSLTISSLEPEDFAVYYCQQRSDWPITFGQGTRLEIK

SEQ ID NO: 19042 - protein, 110 aa, Artificial Sequence; identical to SEQ ID NO: 18934
  Synthetic polypeptide representing artificial human antibody VL domain

SEQ ID NO: 19043 - protein, 111 aa, Artificial Sequence
  Synthetic polypeptide representing artificial human antibody VL domain
DIVVTQSPPSLPVTPGEPASISCRSSQSLLDRNGHNCLDWYLQKPGQSPQVLIYLASNRAPGVPDRFSGSGSGKDFTLKISRVEAEDVGIYYCVQSLQSWTFGQGTKVEIK

SEQ ID NO: 19044 - protein, 110 aa, Artificial Sequence
  Synthetic polypeptide representing artificial human antibody VL domain
QSALTQPASVSGSPGQSITISCTGTSSDVGSYNLVSWYQQHPGKAPKLMIYEVSKRPSGVSNRFSGSKSGNTASLTISGLQAEDEADYYCCSYAGSSTYVFGTGTKVTVL

SEQ ID NO: 19045 - protein, 107 aa, Artificial Sequence
  Synthetic polypeptide representing artificial human antibody VL domain
DIQMTQSPSTLSASVGDRVTITCRASQSISSWLAWYQQKPGKAPKLLIYKASSLESGVPSRFSGSGSGTEFTLTISSLQPDDFATYYCQQYNSYSRTFGQGTKVEIK

SEQ ID NO: 19046 - protein, 108 aa, Artificial Sequence
  Synthetic polypeptide representing artificial human antibody VL domain
SYVLTQPPSVSVAPGKTARITCGGNNIGSKSVHWYQQKPGQAPVLVVYDDSDRPSGIPERFSGSNSGNTATLTISRVEAGDEADYYCQVWDSSSDQVVFGGGTKLTVL

SEQ ID NO: 19047 - protein, 107 aa, Artificial Sequence; identical to SEQ ID NO: 19045
  Synthetic polypeptide representing artificial human antibody VL domain

SEQ ID NO: 19048 - protein, 108 aa, Artificial Sequence
  Synthetic polypeptide representing artificial human antibody VL domain
EIVLTQSPATLSLSPGERATLSCRASQSVSSYLAWYQQKPGQAPRLLIYDASNRATGIPARFSGSGSGTDFTLTISSLEPEDFAVYYCQQRSNWPSITFGQGTRLEIK

SEQ ID NO: 19049 - protein, 107 aa, Artificial Sequence; identical to SEQ ID NO: 18765
  Synthetic polypeptide representing artificial human antibody VL domain

SEQ ID NO: 19050 - protein, 109 aa, Artificial Sequence
  Synthetic polypeptide representing artificial human antibody VL domain
QAVLTQEPSLTVSPGGTVTLTCDSSTGTVTSGHYPYWIQQKPGQAPRTLIYDTNNKHSWTPARFSGSLLGGKPVLTLSDAQPEDEAEYYCLLSFGTARVFGGGTKLTVL

SEQ ID NO: 19051 - protein, 112 aa, Artificial Sequence
  Synthetic polypeptide representing artificial human antibody VL domain
DIVMTQTPLSSPVTLGQPASISCRSSQSLVHSDGNTYLSWLQQRPGQPPRLLIYKISNRFSGVPDRFSGSGAGTDFTLKISRVEAEDVGVYYCMQATQFPLTFGQGTRLEIK

SEQ ID NO: 19052 - protein, 107 aa, Artificial Sequence
  Synthetic polypeptide representing artificial human antibody VL domain
DIQMTQSPSSLSASIGDRVTITCQASQDIRRYLNWYQQKPGKAPKLLIYDVSILERGVPSRFSGSGSGTDFSLTISSLQAEDFATYFCQHYDSLPPTFGGGTKVEIK

SEQ ID NO: 19053 - protein, 111 aa, Artificial Sequence
  Synthetic polypeptide representing artificial human antibody VL domain
QSALTQPPSASGSPGQSVTISCTGTSSDVGGYNYVSWYQQHPGKAPKLMIYEVSKRPSGVPDRFSGSKSGNTASLTVSGLQAEDEADYYCSSYAGSNNPVVFGGGTKLTVL

SEQ ID NO: 19054 - protein, 110 aa, Artificial Sequence; identical to SEQ ID NO: 18852
  Synthetic polypeptide representing artificial human antibody VL domain

SEQ ID NO: 19055 - protein, 106 aa, Artificial Sequence; identical to SEQ ID NO: 18811
  Synthetic polypeptide representing artificial human antibody VL domain

SEQ ID NO: 19056 - protein, 110 aa, Artificial Sequence; identical to SEQ ID NO: 18925
  Synthetic polypeptide representing artificial human antibody VL domain

SEQ ID NO: 19057 - protein, 107 aa, Artificial Sequence
  Synthetic polypeptide representing artificial human antibody VL domain
EIVLTQSPGTLSLSPGEGATLSCRASEVVTNNYLAWYQQRSGQPPRLLIYATSRRPSGIPDRFSGSGSGTDFTLTISRLEPEDFAVYYCQQYGSSRTFGQGTKVEIK

SEQ ID NO: 19058 - protein, 110 aa, Artificial Sequence
  Synthetic polypeptide representing artificial human antibody VL domain
QSALTQPASVSGSPGQSITISCTGSNSDIGAYDYVSWYQQHPGRAPRVMIYDVSDRPSGVSHRFSGSKSGITASLTISGLQPEDEADYYCCSYTSSSTWVFGGGTRLTVL

SEQ ID NO: 19059 - protein, 113 aa, Artificial Sequence
  Synthetic polypeptide representing artificial human antibody VL domain
DIVMTQSPDSLAVSLGERATINCKSSQSVLYSSNNKNYLAWYQQKPGQPPKLLIYWASTRESGVPDRFSGSGSGTDFTLTISSLQAEDVAVYYCQQYYSTPQTFGQGTKVEIK

SEQ ID NO: 19060 - protein, 110 aa, Artificial Sequence
  Synthetic polypeptide representing artificial human antibody VL domain
QSVLTQPPSVSAAPGQKVTISCSGSSSNIGNNYVSWYQQLPGTAPKLLIYDNNKRPSGIPDRFSGSKSGTSATLGITGLQTGDEADYYCGTWDSSLSAVVFGGGTKLTVL

SEQ ID NO: 19061 - protein, 110 aa, Artificial Sequence
  Synthetic polypeptide representing artificial human antibody VL domain
QSALTQPRSVSGSPGQSVTISCTGTSSDVGGYNYVSWYQQHPGKAPKLMIYDVSKRPSGVPDRFSGSKSGNTASLTISGLQAEDEADYYCCSYAGSYTFVFGGGTKLTVL

SEQ ID NO: 19062 - protein, 113 aa, Artificial Sequence
  Synthetic polypeptide representing artificial human antibody VL domain
DIVMTQSPDSLAVSLGERATINCKSSQSVVYSSNNKNYLAWYQQKPGQSPKLLIYGAGNRESGVPDRFSGSGSGTDFTLTISSLQTEDVAVYYCQQYSSTPFTFGPGTKVEIK

SEQ ID NO: 19063 - protein, 110 aa, Artificial Sequence
  Synthetic polypeptide representing artificial human antibody VL domain
QSALTQPASVSGSPGQSITISCTGTSSDVGSYNLVSWYQQHPGKAPKLMIYEVSKRPSGVSNRFSGSKSGNTASLTISGLQAEDEADYYCCSYAGSSTVVFGGGTKLTVL

SEQ ID NO: 19064 - protein, 110 aa, Artificial Sequence
  Synthetic polypeptide representing artificial human antibody VL domain
QSALTQPASVSGSPGQSITISCTGTSSDVGGYNYVSWYQQHPGKAPKLMIYDVNNRPSGLSNRFSGSKSGNTASLTISGLQAEDEADYYCGSYTSSSTLLFGTGTKVTVL

SEQ ID NO: 19065 - protein, 107 aa, Artificial Sequence
  Synthetic polypeptide representing artificial human antibody VL domain
DIQMTQSPSTLSASVGDRVTITCRASQSISSWLAWYQQKPGKAPKLLIYKASSLESGVPSRFSGSGSGTEFTLTISSLQPDDFATYYCQQYNSYEGTFGQGTKVEIK

SEQ ID NO: 19066 - protein, 107 aa, Artificial Sequence
  Synthetic polypeptide representing artificial human antibody VL domain
DIQMTQSPSSLSASVGDRVTITCRTSQSISRYLNWYQQRPGKAPKLLIYQTSNLQSGVPSTFSGSGYGTDFTLTIRSLQPEDFATYYCQQSYSTPFTFGPGTKVDIK

SEQ ID NO: 19067 - protein, 107 aa, Artificial Sequence
  Synthetic polypeptide representing artificial human antibody VL domain
DIQMTQSPSSLSASVGDRVTITCRASQHIRHDLGWFQQKPGKAPERLIYAASTLQSGVASRFSGSGSGTEFTLTISSLQPEDFATYYCLQHNTYPRTFGQGTKVEIK

SEQ ID NO: 19068 - protein, 107 aa, Artificial Sequence
  Synthetic polypeptide representing artificial human antibody VL domain
DIQMTQSPSTLSASVGDRVTITCRASQSISSWLAWYQQKPGKAPKLLIYKASSLESGVPSRFSGSGSGTEFTLTISSLQPDDFATYYCQQYNSYSYTFGQGTKLEIK

SEQ ID NO: 19069 - protein, 111 aa, Artificial Sequence
  Synthetic polypeptide representing artificial human antibody VL domain
DIVMTQSPDSLAVSLGERATINCKSSQSVLDGSNNNLAWYQQKPGQPPKLLIYWASTRESGVPDRFSGSGSGTDFTLTISSLQAEDVAVYYCQQYYSRPWTFGQGTKVEIK

SEQ ID NO: 19070 - protein, 108 aa, Artificial Sequence
  Synthetic polypeptide representing artificial human antibody VL domain
EIVLTQSPGTLSLSPGERATLSCRASQSVSSSYLAWYQQKPGQAPRLLIYGASSRATGIPDRFSGSGSGTDFTLTISRLEPEDFAVYYCQQYGSSLWTFGQGTKVEIK

SEQ ID NO: 19071 - protein, 107 aa, Artificial Sequence
  Synthetic polypeptide representing artificial human antibody VL domain
EIVLTQSPATLSLSPGERATLSCRASQSISSYLAWYQQKPGQAPRLLIYDASNRATGIPARFSGSGSGTDFTLIISSLEPEDFAVYYCQQRSNWPLTFGGGTKVEIK

SEQ ID NO: 19072 - protein, 109 aa, Artificial Sequence
  Synthetic polypeptide representing artificial human antibody VL domain
EIVLTQSPGTLSLSPGERATLSCRASQSVNRNYLAWYQQKPGQAPRLLIYGASSRATGIPDRFSGSGSGTDFTLTISRLEPEDFAVYYCQQYGTSPPWTFGQGTKVEIK

SEQ ID NO: 19073 - protein, 113 aa, Artificial Sequence
  Synthetic polypeptide representing artificial human antibody VL domain
DIVMTQSPDSLAVSLGERATINCKSSQSVLYSSNNKNYLAWYQQKPGQPPKLLIYWASTRESGVPDRFSGSGSGTDFTLTISSLQAEDVAVYYCQQYFSTPLTFGGGTKVEIK

SEQ ID NO: 19074 - protein, 110 aa, Artificial Sequence
  Synthetic polypeptide representing artificial human antibody VL domain
QSALTQPVSVSGSPGQSITISCTGTSSDVGGYKYVSWFQQHPGKAPKLMIYDVSNRPSGVSNRFSGSKSGNTASLTISGLQAEDEADYYCSSCTSSSTLVFGGGTKLTVL

SEQ ID NO: 19075 - protein, 110 aa, Artificial Sequence
  Synthetic polypeptide representing artificial human antibody VL domain
QSVLTQPPSVSAAPGQKVTISCSGGNSNIGSNYVSWYQQLPGTAPRLLIYDTNNRPSGIPDRFSGSKSGTSATLGITGLQTGDEADYYCGTWDSSLSAYVFGTATKVTVL

SEQ ID NO: 19076 - protein, 108 aa, Artificial Sequence
  Synthetic polypeptide representing artificial human antibody VL domain
SYELTQPPSVSVSPGQTARITCSGDALPKKYAYWYQQKSGQAPVLVIYEDSKRPSGIPERFSGSSSGTVATLTISGAQVEDEADYYCYSTDSSGNHRVFGGGTKLTVL

SEQ ID NO: 19077 - protein, 108 aa, Artificial Sequence [sequence omitted]

SEQ ID NO: 19078 - protein, 108 aa, Artificial Sequence
  Synthetic polypeptide representing artificial human antibody VL domain
EIVLTQSPGTLSLSPGERATLSCRASQSVSSSYLAWYQQKPGQAPRLLIYGASSRATGIPDRFSGSGSGTDFTLTISRLEPEDFAVYYCQQYGSSPWTFGQGTKVEIK

SEQ ID NO: 19079 - protein, 113 aa, Artificial Sequence
  Synthetic polypeptide representing artificial human antibody VL domain
DIVMTQSPDSLTVSLGERATINCKSSQSVLNSSNNKNYLVWYQQKPGQPPKLLLYWASTRESGVPDRFSGSGSGTDFTLTISSLQAEDVAIYYCQQYYSRPLTFGQGTKVEIK

SEQ ID NO: 19080 - protein, 112 aa, Artificial Sequence
  Synthetic polypeptide representing artificial human antibody VL domain
DIVLTQTPLSLSVTPGQPASISCKSSQSLLHSDGKTYLYWYLQKPGQSPQLLIYGVSNRFSGVPDRFSVSGSGTDFTLKISRVEAEDVGVYYCMQTKQLPLTFGGGTKVEIK

SEQ ID NO: 19081 - protein, 112 aa, Artificial Sequence
  Synthetic polypeptide representing artificial human antibody VL domain
DIVMTQTPLSSPVTLGQPASISCRSSQSLVHSDGNTYLSWLQQRPGQPPRLLIYKISNRFSGVPDRFSGSGAGTDFTLKISRVEAEDVGVYYCMQATQFPLTFGGGTKVEIK

SEQ ID NO: 19082 - protein, 108 aa, Artificial Sequence; identical to SEQ ID NO: 18805
  Synthetic polypeptide representing artificial human antibody VL domain

SEQ ID NO: 19083 - protein, 107 aa, Artificial Sequence
  Synthetic polypeptide representing artificial human antibody VL domain
DIQMTQSPSSLSASVGDRVTITCRASQGIRNDLGWYQQKPGRAPKSLIYLASNLQSGVPSRFSGSGAGTEFTLTISSLQPEDSATYYCLQYNTYPRTFGQGTKVEIK

SEQ ID NO: 19084 - protein, 106 aa, Artificial Sequence
  Synthetic polypeptide representing artificial human antibody VL domain
SYELTQPPSVSVSPGQTASITCSGDKLGHKNACWYQQKPGQSPVLVIYEDTKRSSGIPERFSGTNSGNTATLTISGTQAVDEADYHCQAWDSSTVVFGGGTKLTVL

SEQ ID NO: 19085 - protein, 106 aa, Artificial Sequence
  Synthetic polypeptide representing artificial human antibody VL domain
EIVLTQSPATLSLSPGERATLSCRASQSVSSYLAWYQQKPGQAPRLLIYDASNRATGIPARFSGSGSGTDFTLTISSLEPEDFAVYYCQQRSNWLTFGGGTKVEIK

SEQ ID NO: 19086 - protein, 110 aa, Artificial Sequence
  Synthetic polypeptide representing artificial human antibody VL domain
QSALTQPASVSGTPGQSITIACTGTSGDIGAYNFVSWYQKHPGKAPRVIIYDVSDRPSGISDRFSGSKSGNTASLTISGLQAEDEADYFCCSYTTSGPFVFGTGTTVTVL

SEQ ID NO: 19087 - protein, 107 aa, Artificial Sequence
  Synthetic polypeptide representing artificial human antibody VL domain
DIQMTQSPSTQSASVGDRVTITCRASQSISSWLAWYQQKPGKAPKLLIYKASTLESGVPSRFSGSGSGTEFTLTISSLQPDDFATYYCQQYNSYSWTFGQGTKVEIK

SEQ ID NO: 19088 - protein, 107 aa, Artificial Sequence
  Synthetic polypeptide representing artificial human antibody VL domain
DIQMTQSPSSLSASVGDRVTITCQASQDISNYLNWYQQKPGKAPKLLIYDASNLETGVPSRFSGSGSGTDFTFTISSLQPEDIATYYCQQYDNLPFTFGPGTKVDIK

SEQ ID NO: 19089 - protein, 110 aa, Artificial Sequence
  Synthetic polypeptide representing artificial human antibody VL domain
QSVLTQPPSVSGAPGQRVTISCTGSSSNIGAGYDVHWYQQLPGTAPKLLIHGNNNRPSGVPDRFSGSKSGTSASLAITGLQAEDEADYYCQSYDRSLSQVFGTGTKVTVL

SEQ ID NO: 19090 - protein, 112 aa, Artificial Sequence
  Synthetic polypeptide representing artificial human antibody VL domain
DIVMTQSPDSLAVSLGERATINCKSSQTILHSSTKKTHLAWYQHKPGQPPKLLIYWASTRESGVPDRFSGSGSGTDFTLTISSLQADDVAMYYCHQYHSIPTFGHGTKVEIK

SEQ ID NO: 19091 - protein, 110 aa, Artificial Sequence
  Synthetic polypeptide representing artificial human antibody VL domain
QSALTQPASVSGSPGRSITISCTGTSSDVGGYNCVSWYQQHPGKAPKLMIYDVTNRPSGVSKRFSGSKSGNTASLTISGLQAEDEADYYCSSYTSSTTVVFGGGTKLTVL

SEQ ID NO: 19092 - protein, 112 aa, Artificial Sequence
  Synthetic polypeptide representing artificial human antibody VL domain
DIVMTQTPLSSPVTLGQPASISCRSSQSLVHSDGNTYLSWLQQRPGQPPRLLIYKISNRFSGVPDRFSGSGAGTDFTLKISRVEAEDVGVYYCMQATQFPFTFGQGTRLEIK

SEQ ID NO: 19093 - protein, 108 aa, Artificial Sequence
  Synthetic polypeptide representing artificial human antibody VL domain
SYVLTQPPSVSVAPGKTARITCGGNNIGSKSVHWYQQKPGQAPVLVVYDDSDRPSGIPERFSGSNSGNTATLTISRVEAGDEADYYCQVWDSSSDHPVFGGGTKLTVL

SEQ ID NO: 19094 - protein, 108 aa, Artificial Sequence
  Synthetic polypeptide representing artificial human antibody VL domain
EIVLTQSPGTLSLSPGERATLSCRASQSVSSSYLAWYQQKPGQAPRLLIYGASSRATGIPDRFSGSGSGTDFTLTISRLEPEDFAVYYCQQYGSSPYTFGQGTKLEIK

SEQ ID NO: 19095 - protein, 107 aa, Artificial Sequence
  Synthetic polypeptide representing artificial human antibody VL domain
DIQMTQSPSSLSASVGDRVTITCRASQGIRNDLGWYQQKPGKAPKRLIYAASSLQSGVPSRFSGSGSGTEFTLTISSLQPEDFATYYCLQHNSYPFTFGPGTKVDIK

SEQ ID NO: 19096 - protein, 107 aa, Artificial Sequence; identical to SEQ ID NO: 19068
  Synthetic polypeptide representing artificial human antibody VL domain

SEQ ID NO: 19097 - protein, 108 aa, Artificial Sequence
  Synthetic polypeptide representing artificial human antibody VL domain
SSELTQDPAVSVALGQTVRITCQGDSLRSYYASWYQQKPGQAPVLVIYGKNNRPSGIPDRFSGSSSGNTASLTITGAQAEDEADYYCNSRDSSGNHLVFGGGTKLTVL

SEQ ID NO: 19098 - protein, 108 aa, Artificial Sequence
  Synthetic polypeptide representing artificial human antibody VL domain
EIMLTQSPGTLSLSPGERATLSCRASQSVSSSYFAWYQQKPGQAPRLLIYGASSRATGIPDRFSGSGSGTDFTLTISRLEPEDFAVYYCQHYGNSPYTFGQGTKLEIK

SEQ ID NO: 19099 - protein, 107 aa, Artificial Sequence; identical to SEQ ID NO: 18847
  Synthetic polypeptide representing artificial human antibody VL domain

SEQ ID NO: 19100 - protein, 110 aa, Artificial Sequence
  Synthetic polypeptide representing artificial human antibody VL domain
NFMLTQPHSVSESPGKTVTISCTGSSGSIASNYVQWYQQRPGSAPTTVIYEDNQRPSGVPDRFSGSIDSSSNSASLTISGLKTEDEADYYCQSYDSSNQVFGGGTKLTVL

SEQ ID NO: 19101 - protein, 106 aa, Artificial Sequence
  Synthetic polypeptide representing artificial human antibody VL domain
DIQMTQSPSSLSASVGDRVTITCRASQSISSYLNWYQQKPGKAPKLLIYAASSLQSGVPSRFSGSGSGTDFTLTISSLQPEDFATYYCQQSYSTLTFGGGTKVEIK

SEQ ID NO: 19102 - protein, 112 aa, Artificial Sequence
  Synthetic polypeptide representing artificial human antibody VL domain
DVVMTQSPLSLPVTLGQPASFSCRSSQSLVHSDGNTYLNWFQQRPGQSPRRLIYKVSNRDSGVPDRFSGSGSGTDFTLKISRVEAEDVGVYYCMQGTHWSYTFGQGTKLEIK

SEQ ID NO: 19103 - protein, 107 aa, Artificial Sequence; identical to SEQ ID NO: 18857
  Synthetic polypeptide representing artificial human antibody VL domain

SEQ ID NO: 19104 - protein, 108 aa, Artificial Sequence; identical to SEQ ID NO: 19097
  Synthetic polypeptide representing artificial human antibody VL domain

SEQ ID NO: 19105 - protein, 110 aa, Artificial Sequence
  Synthetic polypeptide representing artificial human antibody VL domain
QSVLTQPPSVSAARGQKVTISCSGSSSNIGSNDVSWYQRFPGTAPKVLLYDINNRPSGIPDRFSGSKSATSATLAITGLQTGDEADYYCGTWDTSLSEYVFGTGTKVTVL

SEQ ID NO: 19106 - protein, 110 aa, Artificial Sequence
  Synthetic polypeptide representing artificial human antibody VL domain
QSVLTQPPSASGTPGQRVTISCSGSSSNIGSNYVYWYQQLPGTAPKLLIYSNNQRPSGVPDRFSGSKSGTSASLAISGLRSEDEADYYCAAWDDSLSGVVFGGGTKLTVL

SEQ ID NO: 19107 - protein, 110 aa, Artificial Sequence; identical to SEQ ID NO: 18934
  Synthetic polypeptide representing artificial human antibody VL domain

SEQ ID NO: 19108 - protein, 108 aa, Artificial Sequence
  Synthetic polypeptide representing artificial human antibody VL domain
EIVLTQSPGTLSLSPGERATLSCRASQSVSSSYLAWYQQKPGQAPRLLIYGASSRATGIPDRFSGSGSGTDFTLTISRLEPEDFAVYYCQQYGSSTGTFGQGTKVEIK

SEQ ID NO: 19109 - protein, 107 aa, Artificial Sequence
  Synthetic polypeptide representing artificial human antibody VL domain
AIQMTQSPSSLSAFVGDRVTITCRASQGIRNDLAWYQQKQGKAPSLLIYGASDLQRGVPSRFSGNGSGTAFTLTISSLQPEDFATYYCLQDYQYPLTFGGGTKVEIK

SEQ ID NO: 19110 - protein, 112 aa, Artificial Sequence
  Synthetic polypeptide representing artificial human antibody VL domain
QSVLTQPPSVSGAPGQRVTISCAGSSSNIGAGYEVHWYQHLPGTAPKLLIYGTFNRPSGVPDRFSGSKSGTSASLAITGLQAEDEADYYCQTYDTRLSGSYVFGTGTKVTVL

SEQ ID NO: 19111 - protein, 107 aa, Artificial Sequence
  Synthetic polypeptide representing artificial human antibody VL domain
DIQMTQSPSSLSASVGDRVTITCRASQGISSYLAWYQQKPGKVPKLLIYAASTLQSGVPFRFSGSGSGTDFTLTITSLQPEDVATYYCQKYNSAPWTFGQGTKVEIK

SEQ ID NO: 19112 - protein, 107 aa, Artificial Sequence
  Synthetic polypeptide representing artificial human antibody VL domain
DIQMTQSPSSLSASVGDRVTITCRASQGIDSWLAWYQQKPGKAPNLLIYAASSLQSGVPSRFSGSGSGTDFTLTISNLQPEDFAIYYCQQTKTFPYTFGQGTKLEIK

SEQ ID NO: 19113 - protein, 110 aa, Artificial Sequence
  Synthetic polypeptide representing artificial human antibody VL domain
QSALTQPASVSGSPGQSITISCTGTSSDVGGYNYVSWYQQHPGKAPKLMIYDVSNRPSGVSNRFSGSKSGNTASLTISGLQAEDEADYYCSSYTSSSTVVFGGGTKLTVL

SEQ ID NO: 19114 - protein, 106 aa, Artificial Sequence
  Synthetic polypeptide representing artificial human antibody VL domain
SYELTQPPSVSVSPGQTASITCSGDKLGDKYACWYQQKPGQSPVLVIYQDSKRPSGIPERFSGSNSGNTATLTISGTQAMDEADYYCQAWDSSSVVFGGGTKLTVL

SEQ ID NO: 19115 - protein, 112 aa, Artificial Sequence
  Synthetic polypeptide representing artificial human antibody VL domain
QSVLTQPPSVSGAPGQRVTISCTGSSSNIGAGYDVHWYQQLPGTAPKLLIYGNSNRPSGVPDRFSGSKSGTSASLAITGLQAEDEADYYCQSYDSSLSGWVVFGGGTKLTVL

SEQ ID NO: 19116 - protein, 108 aa, Artificial Sequence
  Synthetic polypeptide representing artificial human antibody VL domain
EIVLTQSPGTLSLSPGERATLSCRASQSVSRNYLAWYQQKPGQAPRLLIYGASSRATGIPDRFSGSGSGTDFTLTISRLEPEDFAVYYCQQYDNSPRTFGGGTKVEIK

SEQ ID NO: 19117 - protein, 112 aa, Artificial Sequence
  Synthetic polypeptide representing artificial human antibody VL domain
DIVMTQAPLPSPVALGQPASISCRSSQSLVHSDGNTYFNWLHQRPGQPPRLLIYQISLRVSGVPDRFSGSGAGTDFTLTISRVEPEDVGIYYCMQATHFPRTFGQGTKVEIK

SEQ ID NO: 19118 - protein, 107 aa, Artificial Sequence
  Synthetic polypeptide representing artificial human antibody VL domain
DIQMTQSPSSVSASVGDRVTITCRASQGISSWLAWYQQKPGKAPKLLIYAASSLQSGVPSRFSGSGSGTDFTLTISSLQPEDFATYYCQQTNSFPYTFGQGTKLGIK

SEQ ID NO: 19119 - protein, 109 aa, Artificial Sequence
  Synthetic polypeptide representing artificial human antibody VL domain
QTVVTQEPSLTVSPGGTVTLTCASSTGAVTSGYYPNWFQQKPGQAPRALIYSTSNKHSWTPARFSGSLLGGKAALTLSGVQPEDEAEYYCLLYYGGAWVFGGGTKLTVL

SEQ ID NO: 19120 - protein, 107 aa, Artificial Sequence
  Synthetic polypeptide representing artificial human antibody VL domain
EIVLTQSPGTLSLSPGERATLSCRASQSVSRLGWYQQKPGQAPRLLIYGASKRAPGIPVRFSGSGSGTDFTLTISRLEPEDFAVYYCQQFGSSPLYTFGQGTKLEIK

SEQ ID NO: 19121 - protein, 113 aa, Artificial Sequence; identical to SEQ ID NO: 18876
  Synthetic polypeptide representing artificial human antibody VL domain

SEQ ID NO: 19122 - protein, 106 aa, Artificial Sequence
  Synthetic polypeptide representing artificial human antibody VL domain
DIQMTQSPSTLSASVGDRVTITCRASESIGGWLAWYQQKPGKAPNLLINQASSLQSGVPSRFSGSGSGTEFTLTISGLQPDDFATYYCLQYKSSYCFGQGTKVEIK

SEQ ID NO: 19123 - protein, 108 aa, Artificial Sequence
  Synthetic polypeptide representing artificial human antibody VL domain
EIVMTQSPATLSVSPGERATLSCRASQSVSSNLAWYQQKPGQAPRLLIYGASTRATGIPARFSGSGSGTEFTLTISSLQSEDFAVYYCQQYNNWPPITFGQGTRLEIK

SEQ ID NO: 19124 - protein, 108 aa, Artificial Sequence; identical to SEQ ID NO: 19076
  Synthetic polypeptide representing artificial human antibody VL domain

SEQ ID NO: 19125 - protein, 108 aa, Artificial Sequence
  Synthetic polypeptide representing artificial human antibody VL domain
SYELTQPPSVSVSPGQTASITCSGDKLGDKYACWYQQKPGQSPVLVIYEDTKRPSGIPERFSGSNSGNTATLTISGTQAMDEADYYCQAWDGSIEGYVFGTGTKVTVL

SEQ ID NO: 19126 - protein, 108 aa, Artificial Sequence; identical to SEQ ID NO: 18838
  Synthetic polypeptide representing artificial human antibody VL domain

SEQ ID NO: 19127 - protein, 110 aa, Artificial Sequence
  Synthetic polypeptide representing artificial human antibody VL domain
QSVLTQPASVSGSPGQAITISCTGTSGDVGRYDLVSWYQQHPGKAPKLLIHEVRTRPSGVSDRFSGSKSGNTASLTISGLQAEDEADYYCCSYAGSITYVFGTGTTVTVL

SEQ ID NO: 19128 - protein, 107 aa, Artificial Sequence; identical to SEQ ID NO: 18940
  Synthetic polypeptide representing artificial human antibody VL domain

SEQ ID NO: 19129 - protein, 107 aa, Artificial Sequence
  Synthetic polypeptide representing artificial human antibody VL domain
EIVMTQSPAPLSVSPGERVTLSCRASQSVSSNLAWYQQKPGQGPRLLIYDASTRATDVPARFSGSGSGTEFTLTISSLQSEDFAVYYCQQYDDWPLTFGGGTKVEIK

SEQ ID NO: 19130 - protein, 108 aa, Artificial Sequence
  Synthetic polypeptide representing artificial human antibody VL domain
SYVLTQSPSVSVAPGKTARIICGGNNIGSKSVHWYQQKPGQAPVVVIYYENDRPSGIPERFSGSNSGNTATLTITRVEAGDEADYYCQVWDSSSDHVVFGGGTKLTVL

SEQ ID NO: 19131 - protein, 112 aa, Artificial Sequence
  Synthetic polypeptide representing artificial human antibody VL domain
DIVMTQSPLSLPVTPGEPASISCRSSQSLLHSKGYNYLDWYLQKPGQSPQLLIYLGSNRASGVPDRFSGSGSGTDFTLKISRVEAEDVGVYYCMQALQTPWTFGQGTKVEIK

SEQ ID NO: 19132 - protein, 110 aa, Artificial Sequence; identical to SEQ ID NO: 18934
  Synthetic polypeptide representing artificial human antibody VL domain

SEQ ID NO: 19133 - protein, 111 aa, Artificial Sequence
  Synthetic polypeptide representing artificial human antibody VL domain
NFMLTQPHSVSESPGKTVTISCTGSSGSIASNYVQWYQQRPGSAPTTVIYEDNQRPSGVPDRFSGSIDSSSNSASLTISGLKTEDEADYYCQSYDSSNPVVFGGGTKLTVL

SEQ ID NO: 19134 - protein, 106 aa, Artificial Sequence; identical to SEQ ID NO: 18811
  Synthetic polypeptide representing artificial human antibody VL domain

SEQ ID NO: 19135 - protein, 110 aa, Artificial Sequence
  Synthetic polypeptide representing artificial human antibody VL domain
QSVLTQPPSASGTPGQRVTISCSGSSSNIGSNYVYWYQQLPGTAPKLLIYSNNQRPSGVPDRFSGSKSGTSASLAISGLRSEDEADYYCAAWDDSLSGRVFGGGTKLTVL

SEQ ID NO: 19136 - protein, 110 aa, Artificial Sequence
  Synthetic polypeptide representing artificial human antibody VL domain
NFMLTQPHSVSESPGKTVTISCTGSSGSIASNYVQWYQQRPGSAPTTVIYEDNQRPSGVPDRFSGSIDSSSNSASLTISGLKTEDEADYYCQSYDSSNVVFGGGTKLTVL

SEQ ID NO: 19137 - protein, 107 aa, Artificial Sequence
  Synthetic polypeptide representing artificial human antibody VL domain
SYELTQPSSVSVSPGQTARITCSGDVLAKKYARWFQQKPGQAPVLVIYKDSERPSGIPERFSGSSSGTTVTLTISGAQVEDEADYYCYSAADNNLGVFGGGTKLTVL

SEQ ID NO: 19138 - protein, 108 aa, Artificial Sequence
  Synthetic polypeptide representing artificial human antibody VL domain
SSELTQDPAVSVALGQTVRITCQGDSLRSYYASWYQQKPGQAPVLVIYGKNNRPSGIPDRFSGSSSGNTASLTITGAQAEDEADYYCNSRDSSGNHYVFGTGTKVTVL

SEQ ID NO: 19139 - protein, 106 aa, Artificial Sequence; identical to SEQ ID NO: 18811
  Synthetic polypeptide representing artificial human antibody VL domain

SEQ ID NO: 19140 - protein, 107 aa, Artificial Sequence
  Synthetic polypeptide representing artificial human antibody VL domain
DIQMTQSPSSVSASVGDRVTITCRASQGIGSWLAWYQQKPGKAPKLLIYAASSLQSGVPSRFSGSGSGTDFTLTISSLQPEDFATYYCQQANSFPLTFGGGTKVEIK

SEQ ID NO: 19141 - protein, 110 aa, Artificial Sequence
  Synthetic polypeptide representing artificial human antibody VL domain
QSVLTQPPSVSAAPGQKVTISCSGSSSNIGNNYVSWYQQLPGTAPKLLIYDNNKRPSGIPDRFSGSKSGTSATLGITGLQTGDEADYYCGTWDSSLSAYVFGTGTKVTVL

SEQ ID NO: 19142 - protein, 110 aa, Artificial Sequence
  Synthetic polypeptide representing artificial human antibody VL domain
NFMLTQPHAVSESPGRTVTISCTRSSGSIASDFVQWYQQRPGSAPTIVIYEDNERPSGVPDRFSGSIDSSSNSASLTISGLKTEDEADYYCQSYDSSNWVFGGGTKLTVL

SEQ ID NO: 19143 - protein, 112 aa, Artificial Sequence; identical to SEQ ID NO: 18813
  Synthetic polypeptide representing artificial human antibody VL domain

SEQ ID NO: 19144 - protein, 109 aa, Artificial Sequence
  Synthetic polypeptide representing artificial human antibody VL domain
EIVLTQSPGTLFLSPGERATFSCRASQSVSSRHLAWYQQKPGQAPRLLIYGASNRATGIPDRFSASGSGTDFTLKIRGVEPEDLAVYYCQQFGSSPWGTFGQGTKLEIK

SEQ ID NO: 19145 - protein, 110 aa, Artificial Sequence
  Synthetic polypeptide representing artificial human antibody VL domain
QSALTQPASVSGSPGQSITISCTGTSSDVGGYNYVSWYQQHPGKAPKLMIYDVSNRPSGVSNRFSGSKSGNTASLTISGLQAEDEADYYCSSYTSSSTYVFGTGTKVTVL

SEQ ID NO: 19146 - protein, 107 aa, Artificial Sequence
  Synthetic polypeptide representing artificial human antibody VL domain
AIEVTQSPSYLSASVGDRVTITCRASRAIRNDLGWYQQKPGKAPKLLIYAASKLQSGVPSRFRGSVSGTDFTLTITNLQPEDFATYYCLQDYNYPFIFGHGTKVDIK

SEQ ID NO: 19147 - protein, 110 aa, Artificial Sequence; identical to SEQ ID NO: 18934
  Synthetic polypeptide representing artificial human antibody VL domain

SEQ ID NO: 19148 - protein, 109 aa, Artificial Sequence
  Synthetic polypeptide representing artificial human antibody VL domain
SSELTQDPAVSVALGQTVRITCQGDSLRSYYASWYQQKPGQAPVLVIYGKNNRPSGIPDRFSGSSSGNTASLTITGAQAEDEADYYCNSRDSSGNHLGVFGGGTKLTVL

SEQ ID NO: 19149 - protein, 107 aa, Artificial Sequence
  Synthetic polypeptide representing artificial human antibody VL domain
SYELTQPPSVSVSPGQTARITCSGDALPKQYAYWYQQKPGQAPVLVIYKDSERPSGIPERFSGSSSGTTVTLTISGVQAEDEADYYCQSADSSGTYVFGTGTKVTVL

SEQ ID NO: 19150 - protein, 107 aa, Artificial Sequence
  Synthetic polypeptide representing artificial human antibody VL domain
AIQMTQSPSSLSASVGDRVTITCRASQGIRNDLGWYQQKPGKAPKLLIYAASSLQSGVPSRFSGSGSGTDFTLTISSLQPEDFATYYCLQDYNYPLTFGGGTKVEIK

SEQ ID NO: 19151 - protein, 107 aa, Artificial Sequence; identical to SEQ ID NO: 19068
  Synthetic polypeptide representing artificial human antibody VL domain

SEQ ID NO: 19152 - protein, 110 aa, Artificial Sequence
  Synthetic polypeptide representing artificial human antibody VL domain
QSVLTQPPSVSGAPGQRVTISCTGSSSNIGAGYDVHWYQQLPGTAPKLLIYGNSNRPSGVPDRFSGSKSGTSASLAITGLQAEDEADYYCQSYDSSLSGVFGGGTKLTVL

SEQ ID NO: 19153 - protein, 112 aa, Artificial Sequence
  Synthetic polypeptide representing artificial human antibody VL domain
DIVMTQTPLSSPVTLGQPASISCRSSQSLVHSDGNTYLSWLQQRPGQPPRLLIYKISNRFSGVPDRFSGSGAGTDFTLKISRVEAEDVGVYYCMQATQFPYTFGQGTKLEIK

SEQ ID NO: 19154 - protein, 110 aa, Artificial Sequence; identical to SEQ ID NO: 19145
  Synthetic polypeptide representing artificial human antibody VL domain

SEQ ID NO: 19155 - protein, 107 aa, Artificial Sequence
  Synthetic polypeptide representing artificial human antibody VL domain
EIVMTQSPATLSVSPGERATLSCRASQSVSSNLAWYQQKPGQAPRLLIYGASTRATGIPARFSGSGSGTEFTLTISSLQSEDFAVYYCQQYNNWPRTFGQGTKVEIK

SEQ ID NO: 19156 - protein, 108 aa, Artificial Sequence
  Synthetic polypeptide representing artificial human antibody VL domain
EIVMTQSPATLSVSPGERATLSCRASQSVSSNLAWYQQKPGQAPRLLIYGASTRATGIPARFSGSGSGTEFTLTISSLQSEDFAVYYCQQYNNWPPWTFGQGTKVEIK

SEQ ID NO: 19157 - protein, 107 aa, Artificial Sequence
  Synthetic polypeptide representing artificial human antibody VL domain
DIQMTQSPSSLSASVGDRVTITCQASQDISNYLNWYQQKPGKAPKLLIYDASNLETGVPSRFSGSGSGTDFTFTISSLQPEDIATYYCQQYDNLPLTFGGGTKVEIK

SEQ ID NO: 19158 - protein, 110 aa, Artificial Sequence; identical to SEQ ID NO: 18934
  Synthetic polypeptide representing artificial human antibody VL domain

SEQ ID NO: 19159 - protein, 107 aa, Artificial Sequence
  Synthetic polypeptide representing artificial human antibody VL domain
DIQMTQSPSTLSASVGDRVTITCRASQSISSWLAWYQQKPGKAPKLLIYKASSLESGVPSRFSGSGSGTEFTLTISSLQPDDFATYYCQQYNSPLWTFGQGTKVEIK

SEQ ID NO: 19160 - protein, 110 aa, Artificial Sequence
  Synthetic polypeptide representing artificial human antibody VL domain
QAVVTQEPSLTVSPGGTVTLTCGSSTGAVTSGHYPYWFQQKPGQAPRTLIYDTSNKHSWTPARFSGSLLGGKAALTLSGAQPEDEAEYYCLLSYSGAYAVFGGGTQLTVL

SEQ ID NO: 19161 - protein, 112 aa, Artificial Sequence; identical to SEQ ID NO: 18813
  Synthetic polypeptide representing artificial human antibody VL domain

SEQ ID NO: 19162 - protein, 107 aa, Artificial Sequence
  Synthetic polypeptide representing artificial human antibody VL domain
EIVMTQSPATLSVSPGERATLSCRASQSVNSNLAWYQQKPDQAPRLLIYGASTRATGTPARFSGSGSGTEFTLTISSLQSEDFAVYYCQQYDVWPLTFGGGTKVEIK

SEQ ID NO: 19163 - protein, 113 aa, Artificial Sequence
  Synthetic polypeptide representing artificial human antibody VL domain
DIVMTQSPDSLAVSLGERATINCKSSQSVLYSSNNKNYLAWYQQKPGQPPKLLIYWASTRESGVPDRFSGSGSGTDFTLTISSLQAEDVAVYYCQQYYSTPSTFGQGTKLEIK

SEQ ID NO: 19164 - protein, 113 aa, Artificial Sequence
  Synthetic polypeptide representing artificial human antibody VL domain
DIVMTQSPDSLAVSLGERATINCKSSQSVLYSSNNKNYLAWYQQEPGQPPKLLIYWASTRESGVPDRFSGSGSGTDFTLTISSLQAEDVAVYYCQQYYSTPRTFGQGTKLEIK

SEQ ID NO: 19165 - protein, 111 aa, Artificial Sequence
  Synthetic polypeptide representing artificial human antibody VL domain
QLVLTQSPSASASLGASVKLTCTLSSGHSSYAIAWHQQQPEKGPRYLMKLNSDGSHSKGDGIPDRFSGSSSGAERYLTISSLQSEDEADYYCQTWGTGTVVFGGGTKLTVL

SEQ ID NO: 19166 - protein, 109 aa, Artificial Sequence
  Synthetic polypeptide representing artificial human antibody VL domain
QSALTQPASVSGSPGQSITISCTGTSSDVGGYNYVSWYQQHPGKAPKLMIYDVSNRPSGVSNRFSGSKSGNTASLTISGLQAEDEADYYCSSYTSSTVVFGGGTKLTVL

SEQ ID NO: 19167 - protein, 108 aa, Artificial Sequence; identical to SEQ ID NO: 18838
  Synthetic polypeptide representing artificial human antibody VL domain

SEQ ID NO: 19168 - protein, 107 aa, Artificial Sequence
  Synthetic polypeptide representing artificial human antibody VL domain
DIQMTQSPSSLSASVGDRVTITCQASQDIYVYVHWYQQKSGGAPKPLIHDASYLEAGVPSRFSGSRSGTYFTLTISNLQPEDVASYYCEQYDKFPITFGQGTRVEIK

SEQ ID NO: 19169 - protein, 108 aa, Artificial Sequence
  Synthetic polypeptide representing artificial human antibody VL domain
SYVLTQPPSVSVAPGKTARITCGGNNIGSKSVHWYQQKPGQAPVLVVYDDSDRPSGIPERFSGSNSGNTATLTISRVEAGDEADYYCQVWDSSSDHWVFGGGTKLTVL

SEQ ID NO: 19170 - protein, 110 aa, Artificial Sequence
  Synthetic polypeptide representing artificial human antibody VL domain
QSALTQPASVSGSPGQSITISCTGTSSDVGGYNYVSWYQQHPGKAPKLMIYDVSNRPSGVSNRFSGSKSGNTASLTISGLQAEDEADYYCSSYTSSSTLVFGGGTKLTVL

SEQ ID NO: 19171 - protein, 112 aa, Artificial Sequence; identical to SEQ ID NO: 19051
  Synthetic polypeptide representing artificial human antibody VL domain

SEQ ID NO: 19172 - protein, 111 aa, Artificial Sequence
  Synthetic polypeptide representing artificial human antibody VL domain
QSVLTQPPSVSAAPGQKVTISCSGSSSNIGNNYVSWYQQLPGTAPKLLIYDNNKRPSGIPDRFSGSKSGTSATLGITGLQTGDEADYYCGTWDSSLSAEVVFGGGTKLTVL

SEQ ID NO: 19173 - protein, 108 aa, Artificial Sequence; identical to SEQ ID NO: 19156
  Synthetic polypeptide representing artificial human antibody VL domain

SEQ ID NO: 19174 - protein, 107 aa, Artificial Sequence [sequence omitted]

SEQ ID NO: 19175 - protein, 105 aa, Artificial Sequence
  Synthetic polypeptide representing artificial human antibody VL domain
SYELTQPISVSVNLGQTARITCGGETIGSKIVHWYQQRPGQAPVLVIYRDSNRPSGIPERFSGSNSGNTATLTISRAQDGDEGDYYCQVWDSSVVFGGGTKLTVL

SEQ ID NO: 19176 - protein, 106 aa, Artificial Sequence
  Synthetic polypeptide representing artificial human antibody VL domain
AIRMTQSPSSFSASTGDRVTITCRASQGISSYLAWYQQKPGKAPKLLIYAASTLQSGVPSRFSGSGSGTDFTLTISCLQSEDFATYYCQQYYSYPTFGQGTRLEIK

SEQ ID NO: 19177 - protein, 108 aa, Artificial Sequence
  Synthetic polypeptide representing artificial human antibody VL domain
SYELTQPPSVSVSPGQTARITCSADALPKQYAYWYQQKPGQAPVLVIYKDSERPSGIPERFSGSSSGTTVTLTISGVQAEDEADYYCQSADSSGTYWVFGGGTKLTVL

SEQ ID NO: 19178 - protein, 111 aa, Artificial Sequence
  Synthetic polypeptide representing artificial human antibody VL domain
QSVLTQPPSASGTPGQRVTISCSGSSSNIGSNYVYWYQQLPGTAPKLLIYSNNQRPSGVPDRFSGSKSGTSASLAISGLRSEDEADYYCAAWDDSLSGLWVFGGGTKLTVL

SEQ ID NO: 19179 - protein, 109 aa, Artificial Sequence
  Synthetic polypeptide representing artificial human antibody VL domain
EIVMTQSPATLSVSPGERATLSCRASQSVSSNLAWYQQKPGQAPRLLIYGASTRATGIPARFSGSGSGTEFTLTISSLQSEDFAVYYCQQYNNWPQVYTFGQGTKLEIK

SEQ ID NO: 19180 - protein, 112 aa, Artificial Sequence
  Synthetic polypeptide representing artificial human antibody VL domain
DVVMTQSPLSLPVTLGQPASISCKSSQSLVYSDGNTYLNWFQQRPGQSPRRLIYKVSNRDSGVPDRFSGSGSGTDFTLKISRVEAEDLGVYYCMQGTLWPPTFGQGTKLEIE

SEQ ID NO: 19181 - protein, 112 aa, Artificial Sequence
  Synthetic polypeptide representing artificial human antibody VL domain
DIVMTQAPLPSPVALGQPASISCRSSQSLVHSDGNTYFNWLHQRPGQPPRLLIYQISLRVSGVPDRFSGSGAGTDFTLTISRVEPEDVGIYYCMQATHFPRTFGQGTKVEVK

SEQ ID NO: 19182 - protein, 106 aa, Artificial Sequence
  Synthetic polypeptide representing artificial human antibody VL domain
DIQMTQSPSSLSASVGDRVTITCRASQSISSYLNWYQQKPGKAPKLLIYAASSLQSGVPSRFSGSGSGTDFTLTISSLQPEDFATYYCQQSYSTPTFGGGTKVEIK

SEQ ID NO: 19183 - protein, 112 aa, Artificial Sequence; identical to SEQ ID NO: 18831
  Synthetic polypeptide representing artificial human antibody VL domain

SEQ ID NO: 19184 - protein, 111 aa, Artificial Sequence
  Synthetic polypeptide representing artificial human antibody VL domain
QSVLTQPPSVSGAPGQGVTISCTGGSSNIGAGSDVHWYQQLPGTAPKLLIYANNNRPSGVPDRFSASKSGTSASLAITGLRTEDEADYYCQSYDSSLSASVFGGGTKVTVL

SEQ ID NO: 19185 - protein, 110 aa, Artificial Sequence
  Synthetic polypeptide representing artificial human antibody VL domain
QSVLTQPPSASETPGQRVTISCSGSSSNIGSNTVNWYQHLPGTAPKLLIYSNNQRPSGVPDRFSGSKSGTSASLAISGLQSEDEADYYCAAWDDSLNGWVFGGGTKLTVL

SEQ ID NO: 19186 - protein, 105 aa, Artificial Sequence
  Synthetic polypeptide representing artificial human antibody VL domain
SYELTQPPSVSVSPGQTASITCSGDKLGDKYACWYQQKPGQSPVLVIYQDSKRPSGIPERFSGSNSGNTATLTISGTQAMDEADYYCQAWDSSIVFGGGTKLTVL

SEQ ID NO: 19187 - protein, 110 aa, Artificial Sequence; identical to SEQ ID NO: 18886
  Synthetic polypeptide representing artificial human antibody VL domain

SEQ ID NO: 19188 - protein, 110 aa, Artificial Sequence; identical to SEQ ID NO: 19141
  Synthetic polypeptide representing artificial human antibody VL domain

SEQ ID NO: 19189 - protein, 107 aa, Artificial Sequence
  Synthetic polypeptide representing artificial human antibody VL domain
DIQMTQSPSTLSASVGDRVTITCRASQSISSWLAWYQQKPGKAPKLLIYKASSLESGVPSRFSGSGSGTEFTLTISSLQPDDFATYYCQQYNSYSWTFGQGTKVEIK

SEQ ID NO: 19190 - protein, 110 aa, Artificial Sequence
  Synthetic polypeptide representing artificial human antibody VL domain
QSVLTQPPSASGTPGQRVTISCSGSSSNIGSNTVNWYQQLPGTAPKLLIYSNNQRPSGVPDRFSGSKSGTSASLAISGLQSEDEADYYCAAWDDSLNGWVFGGGTKLTVL

SEQ ID NO: 19191 - protein, 107 aa, Artificial Sequence
  Synthetic polypeptide representing artificial human antibody VL domain
DIQLTQSPPFLSASVGDRVTITCRASQGISTYLAWYQQKPGKAPKLLMYAASTLQSGVPSRFSGSGSGTEFTLTISILKPEDAATYYCQQVDSYPNTFGQGTKLEIQ

SEQ ID NO: 19192 - protein, 107 aa, Artificial Sequence
  Synthetic polypeptide representing artificial human antibody VL domain
EIVMTQSPGTLSVSPGERATLSCRASQSVSNNLAWYQQKPGQAPRLLIYGASTRATGTPAGFTGSGSGTEFTLTISGLQSEDSALYYCQQYHDWPITFGQGTRLEIK

SEQ ID NO: 19193 - protein, 108 aa, Artificial Sequence
  Synthetic polypeptide representing artificial human antibody VL domain
EIVLTQSPGTLSLSPGERATLSCRASQSVSSSYLAWYQQKPGQAPRLLIYGASSRATGIPDRFSGSGSGTDFTLTISRLEPEDFAVYYCQQYGSSPLTFGQGTKVEIK

SEQ ID NO: 19194 - protein, 110 aa, Artificial Sequence; identical to SEQ ID NO: 19141
  Synthetic polypeptide representing artificial human antibody VL domain

SEQ ID NO: 19195 - protein, 109 aa, Artificial Sequence
  Synthetic polypeptide representing artificial human antibody VL domain
QSVLTQPPSASGTPGQRVTISCSGSSSNIGSNTVNWYQQLPGTAPKLLIYSNNQRPSGVPDRFSGSKSGTSASLAISGLQSEDEADYYCAAWDDSLNRVFGGGTKLTVL

SEQ ID NO: 19196 - protein, 113 aa, Artificial Sequence
  Synthetic polypeptide representing artificial human antibody VL domain
DIVMTQSPDSLAVSLGERATINCKSSQSVLYSSNNKNYLAWYQQKPGQPPKLLIYWASTRESGVPDRFSGSGSGTDFTLTISSLQAEDVAVYYCQQYYSTPWTFGQGTKVEIK

SEQ ID NO: 19197 - protein, 110 aa, Artificial Sequence; identical to SEQ ID NO: 19141
  Synthetic polypeptide representing artificial human antibody VL domain

SEQ ID NO: 19198 - protein, 110 aa, Artificial Sequence
  Synthetic polypeptide representing artificial human antibody VL domain
QSALTQPPSASGSPGQSVTISCTGTSSDVGGYNYVSWYQQHPGKAPKLMIYEVSKRPSGVPDRFSGSKSGNTASLTVSGLQAEDEADYYCSSYAGSNNVVFGGGTKLTVL

SEQ ID NO: 19199 - protein, 109 aa, Artificial Sequence
  Synthetic polypeptide representing artificial human antibody VL domain
DIQMTQSPSSLSASVGDRVTITCRASQSISSYLNWYQQKPGKAPKLLIYAASSLQSGVPSRFSGSGSGTDFTLTISSLQPEDFATYYCQQSYSTPPMYTFGQGTKLEIK

SEQ ID NO: 19200 - protein, 110 aa, Artificial Sequence
  Synthetic polypeptide representing artificial human antibody VL domain
QSVLTQPPSASGTPGQRVTISCSGSSSNIGSNTVNWYQQLPGTAPKLLIYSNNQRPSGVPDRFSGSKSGTSASLAISGLQSEDEADYYCAAWDDSLNGPVFGGGTKLTVL

SEQ ID NO: 19201 - protein, 107 aa, Artificial Sequence
  Synthetic polypeptide representing artificial human antibody VL domain
EIVLTQSPATLSLSPGERATLSCRASQNIGNFLAWYQQKPGQAPSLLIYDVSNRATGIPARFSGSGSGTDFTLTISSLEPQDFAIYYCQQRSAWPLTFGQGTRLEIK

SEQ ID NO: 19202 - protein, 111 aa, Artificial Sequence
  Synthetic polypeptide representing artificial human antibody VL domain
QSALTQPASVSGSPGQSITISCTGTSSDVGGYNYVSWYQQHPGKAPKLMIYDVSNRPSGVSNRFSGSKSGNTASLTISGLQAEDEADYYCSSYTSSSTLVVFGGGTKLTVL

SEQ ID NO: 19203 - protein, 110 aa, Artificial Sequence
  Synthetic polypeptide representing artificial human antibody VL domain
QSVLTQPPSASGTPGQRVTISCSGSSSNIGSNTVNWYQQFPGTAPKLLIYSNNQRPSGVPDRFSGSKSGTSASLAISGLQSEDEADYYCAAWDDSLKGLGFGGGTKLTVL

SEQ ID NO: 19204 - protein, 110 aa, Artificial Sequence; identical to SEQ ID NO: 19170
  Synthetic polypeptide representing artificial human antibody VL domain

SEQ ID NO: 19205 - protein, 107 aa, Artificial Sequence; identical to SEQ ID NO: 19068
  Synthetic polypeptide representing artificial human antibody VL domain

SEQ ID NO: 19206 - protein, 112 aa, Artificial Sequence
  Synthetic polypeptide representing artificial human antibody VL domain
QSVLTQPPSASGTPGQRVTISCSGSRSNIGSNFVFWYQQFPGTAPKLLVYKNNQRPSGVPDRFSVSKSGTSASLAISGLRSEDEAEYYCASWDDSLTGPNYVFGTGTKVTVL

SEQ ID NO: 19207 - protein, 107 aa, Artificial Sequence
  Synthetic polypeptide representing artificial human antibody VL domain
EIVLTQSPATLSLSPGERATLSCRASQSVSSYLAWYQQKPGQAPRLLIYDASNRATGIPARFSGSGSGTDFTLTISSLEPEDFAVYYCQQRSNWPSTFGGGTKVEIK

SEQ ID NO: 19208 - protein, 110 aa, Artificial Sequence; identical to SEQ ID NO: 18852
  Synthetic polypeptide representing artificial human antibody VL domain

SEQ ID NO: 19209 - protein, 108 aa, Artificial Sequence; identical to SEQ ID NO: 18805
  Synthetic polypeptide representing artificial human antibody VL domain

SEQ ID NO: 19210 - protein, 110 aa, Artificial Sequence; identical to SEQ ID NO: 19113
  Synthetic polypeptide representing artificial human antibody VL domain

SEQ ID NO: 19211 - protein, 108 aa, Artificial Sequence; identical to SEQ ID NO: 19169
  Synthetic polypeptide representing artificial human antibody VL domain

SEQ ID NO: 19212 - protein, 109 aa, Artificial Sequence
  Synthetic polypeptide representing artificial human antibody VL domain
EIVLTQSPGTLSLSPGERATLSCRASQSVSSSFLAWYQQKPGQTPRLLIYGASSRATGIPDRFSGSGSGTDFTLTISRLEPEDFAVYYCQQFDYSPRWTFGQGTKVEIK

SEQ ID NO: 19213 - protein, 106 aa, Artificial Sequence; identical to SEQ ID NO: 18811
  Synthetic polypeptide representing artificial human antibody VL domain

SEQ ID NO: 19214 - protein, 108 aa, Artificial Sequence
  Synthetic polypeptide representing artificial human antibody VL domain
SSELTQGPAVSVALGQTVRITCQGDSLKFSFSCWYQHKPGQAPVVVIFGQNNRPSGIPDRFSGSDSGDTTSLIITGAQAEDEADYYCSSRDRSGSHVVFGGGTRLTVL

SEQ ID NO: 19215 - protein, 108 aa, Artificial Sequence
  Synthetic polypeptide representing artificial human antibody VL domain
EIALAQSPATLSLSPGETATLSCRASEIIGNTLAWYQHKVGQPPRLLIYATSTRATGVPARFSGSGSGTDFTLTISALQSEDFALYYCQQYNEWPRITFGQGTRLEIK

SEQ ID NO: 19216 - protein, 108 aa, Artificial Sequence; identical to SEQ ID NO: 19011
  Synthetic polypeptide representing artificial human antibody VL domain

SEQ ID NO: 19217 - protein, 108 aa, Artificial Sequence; identical to SEQ ID NO: 19169
  Synthetic polypeptide representing artificial human antibody VL domain

SEQ ID NO: 19218 - protein, 112 aa, Artificial Sequence; identical to SEQ ID NO: 19115
  Synthetic polypeptide representing artificial human antibody VL domain

SEQ ID NO: 19219 - protein, 110 aa, Artificial Sequence
  Synthetic polypeptide representing artificial human antibody VL domain
QSVLTQPPSASGTPGQRVTISCSGSSSNIGSRAVNWYHQLPGTAPKLLVYRNDQRPSGVPDRFSGSKSGTSASLAISGLQSEDEADYYCAAWDDSLNAWVFGGGTKLTVL

SEQ ID NO: 19220 - protein, 109 aa, Artificial Sequence
  Synthetic polypeptide representing artificial human antibody VL domain
QSVLTQPPSVSAAPGQKVTISCSGSSSTIGDNYVSWYQHLPGTAPKLLIYDNNKRPSGIPDRFSGSKSGTSATLGITGLQTGDEADYYCATWDTSLSVVFGGGTKLTVL

SEQ ID NO: 19221 - protein, 106 aa, Artificial Sequence
  Synthetic polypeptide representing artificial human antibody VL domain
SYELTQAPSVSVSPGQTARITCSGDTLAKKYVYWYQQKPGQAPVLIMYKDTERPSGIPERFSGSSSGTIVTLTISGVQAEDEADYYCQAVDGKNYVFGGGTKVTVL

SEQ ID NO: 19222 - protein, 110 aa, Artificial Sequence; identical to SEQ ID NO: 19190
  Synthetic polypeptide representing artificial human antibody VL domain

SEQ ID NO: 19223 - protein, 108 aa, Artificial Sequence
  Synthetic polypeptide representing artificial human antibody VL domain
SYELTQPPSVSVSPGQTARITCSGDALPKQYAYWYQQKPGQAPVLVIYKDSERPSGIPERFSGSSSGTTVTLTISGVQAEDEADYYCQSADSSGPLYVFGTGTKVTVL

SEQ ID NO: 19224 - protein, 108 aa, Artificial Sequence; identical to SEQ ID NO: 19078
  Synthetic polypeptide representing artificial human antibody VL domain

SEQ ID NO: 19225 - protein, 113 aa, Artificial Sequence
  Synthetic polypeptide representing artificial human antibody VL domain
DIVMTQSPDSLAVSVGERATINCKSSQSILYTSNNKNYLAWYQHKPGQPPKLLLYWASTRESGVPDRFSGSGSGTDFTLTISSLLAEDVAVYYCQQYYSTPYTFGQGTKLEIK

SEQ ID NO: 19226 - protein, 110 aa, Artificial Sequence; identical to SEQ ID NO: 18934
  Synthetic polypeptide representing artificial human antibody VL domain

SEQ ID NO: 19227 - protein, 108 aa, Artificial Sequence
  Synthetic polypeptide representing artificial human antibody VL domain
EIVLTQSPGTLSLSPGERATLSCRASQSISSSYLAWYQQKPGQAPRLLIYGASSRATGIPDRFSGSGSGTDFTLTISRLEPEDFAVYYCQQYGSSPGTFGPGTKVDIK

SEQ ID NO: 19228 - protein, 107 aa, Artificial Sequence; identical to SEQ ID NO: 18765
  Synthetic polypeptide representing artificial human antibody VL domain

SEQ ID NO: 19229 - protein, 108 aa, Artificial Sequence
  Synthetic polypeptide representing artificial human antibody VL domain
SYVLTQPPSVSVAPGKTARITCGGNNIGSKSVHWYQQKPGQAPVLVVYDDSDRPSGIPERFSGSNSGNTATLTISRVEAGDEADYYCQVWDSSSDHVVFGGGTKLTVL

SEQ ID NO: 19230 - protein, 109 aa, Artificial Sequence
  Synthetic polypeptide representing artificial human antibody VL domain
QAVVTQEPSLTVSPGGIVTLTCGSSFGAVTSGHYPYWFQQKPGQAPRTLIYDTSNKHSWTPARFSGSLLGGRATLTLSGAQPEDEADYYCLLSYSGTWVFGGGTKLSVL

SEQ ID NO: 19231 - protein, 108 aa, Artificial Sequence; identical to SEQ ID NO: 19094
  Synthetic polypeptide representing artificial human antibody VL domain

SEQ ID NO: 19232 - protein, 108 aa, Artificial Sequence
  Synthetic polypeptide representing artificial human antibody VL domain
EIVMTQSPATLSVSPGERATLSCRASQSVRSNLAWYQQKPGQAPRLLIYGASTRATGIPARFSGSGSGTEFTLTISSLQSEDFAVYYCQQYNNWPPYTFGQGTKLEIK

SEQ ID NO: 19233 - protein, 107 aa, Artificial Sequence
  Synthetic polypeptide representing artificial human antibody VL domain
DIQMTQSPSAMSASVGDRVTITCRASQGISNYLAWFQQKPGKVPKRLIYAASSLQSGVPSRFSGSGSGTEFTLTISSLQPEDFATYYCLQHNSYPPTFGGGTKVEIK

SEQ ID NO: 19234 - protein, 107 aa, Artificial Sequence
  Synthetic polypeptide representing artificial human antibody VL domain
DIQMTQSPSTLSASVGDRVTITCRASQSISSWLAWYQQKPGKAPKLLIYKASSLESGVPSRFSGSGSGTEFTLTISSLQPDDFATYYCQQYNSYPYTFGQGTKLEIK

SEQ ID NO: 19235 - protein, 112 aa, Artificial Sequence
  Synthetic polypeptide representing artificial human antibody VL domain
DIVMTQTPLSLSVTPGQPASISCKSSQSLLHSDGKTYLYWYLQKPGQPPQLLIYEVSNRFSGVPDRFSGSGSGTDFTLKISRVEAEDVGVYYCMQSIQLPYTFGQGTKLEIK

SEQ ID NO: 19236 - protein, 108 aa, Artificial Sequence [sequence omitted]

SEQ ID NO: 19237 - protein, 107 aa, Artificial Sequence
  Synthetic polypeptide representing artificial human antibody VL domain
DIQMTQSPSSLSASVGDRVTITCRASQSISSYLNWYQQKPGKAPKLLIYAASSLQSGVPSRFSGSGSGTDFTLTISSLQPEDFATYYCQQSYSTPRTFGQGTKVEIK

SEQ ID NO: 19238 - protein, 110 aa, Artificial Sequence; identical to SEQ ID NO: 19145
  Synthetic polypeptide representing artificial human antibody VL domain

SEQ ID NO: 19239 - protein, 107 aa, Artificial Sequence; identical to SEQ ID NO: 18857
  Synthetic polypeptide representing artificial human antibody VL domain

SEQ ID NO: 19240 - protein, 108 aa, Artificial Sequence
  Synthetic polypeptide representing artificial human antibody VL domain
EIVLTQSPGTLSLSPGESATLSCGASQTVNSNYLVWYQQKPGQAPRLLIYGASHRATDVPDRISGGGAGTHFTLTIRRLEPEDSAVYYCHQFGDPPYTFGQGTRVEIK

SEQ ID NO: 19241 - protein, 112 aa, Artificial Sequence
  Synthetic polypeptide representing artificial human antibody VL domain
DIVMTQSPLSLPVTPGEPASISCRSSQSLLHSNGYNYLDWYLQKPGQSPQLLIYLGSNRASGVPDRFSGSGSGTDFTLKISRVEAEDVGVYYCMQALQTPPTFGQGTRLEIK

SEQ ID NO: 19242 - protein, 110 aa, Artificial Sequence; identical to SEQ ID NO: 19136
  Synthetic polypeptide representing artificial human antibody VL domain

SEQ ID NO: 19243 - protein, 108 aa, Artificial Sequence
  Synthetic polypeptide representing artificial human antibody VL domain
EIVLTQSPGTLSLSPGERATLSCRASQSVSSSFLAWYQQRPGQAPRLLIYGASRRASGIPDRFSAGGSGTDFTLTISRLEPEDFAMYYCQQFGTSPETFGPGTKVDVK

SEQ ID NO: 19244 - protein, 112 aa, Artificial Sequence; identical to SEQ ID NO: 18831
  Synthetic polypeptide representing artificial human antibody VL domain

SEQ ID NO: 19245 - protein, 106 aa, Artificial Sequence
  Synthetic polypeptide representing artificial human antibody VL domain
SYELTQPPSVSVSPGQTASITCSGDKLGDKYACWYQQKPGQSPVLVIYQDSKRPSGIPERFSGSNSGNTATLTISGTQAMDEADYYCQAWDSSIVVFGGGTKLTVL

SEQ ID NO: 19246 - protein, 112 aa, Artificial Sequence
  Synthetic polypeptide representing artificial human antibody VL domain
DVVMTQSPLSLPVTLGQPASISCRSSQSLVHSDGNTYLNWFQQRPGQSPRRLIYKVSNRDSGVPDRFSGSGSGTDFTLKISRVEAEDVGVYYCMQGTHWPRTFGQGTKLEIK

SEQ ID NO: 19247 - protein, 106 aa, Artificial Sequence
  Synthetic polypeptide representing artificial human antibody VL domain
SYELTQPPSVSVSPGQTASITCSGDKLGDKYAYWYQQKPGQSPVLVIYQDSKRPSGIPERFSGSNSGNTATLTISGTQAMDEADYYCQAWDSSTVVFGGGTKLTVL

SEQ ID NO: 19248 - protein, 108 aa, Artificial Sequence
  Synthetic polypeptide representing artificial human antibody VL domain
SYVLTQPPSVSVAPGKTATITCGGSDTGSQSVHWYQQKPGQAPVLVVYDNSDRPSGIPVRFSGSNSGNTATLTVSRVEAGDEADYYCQVWDTSSDEWVFGGGTKLTVL

SEQ ID NO: 19249 - protein, 108 aa, Artificial Sequence
  Synthetic polypeptide representing artificial human antibody VL domain
EIVLTQSPATLSVSPGERGTLSCRASQSVNSNLAWYQQKPGQAPRLLIYGASTRATGIPARFSGSGSGTDFSLTISGLQSEDFAVYYCQQYNDWPPWTFGQGTKVEIK

SEQ ID NO: 19250 - protein, 108 aa, Artificial Sequence; identical to SEQ ID NO: 19011
  Synthetic polypeptide representing artificial human antibody VL domain

SEQ ID NO: 19251 - protein, 107 aa, Artificial Sequence
  Synthetic polypeptide representing artificial human antibody VL domain
DIQMTQSPSSLSASVGDRVTITCRASQGISNYLAWFQQKPGKAPKSLIYAASSLQSGVPSKFSGSGSGTDFTLTISSLQPEDFATYYCQQYNSYPFTFGPGTKVDIK

SEQ ID NO: 19252 - protein, 108 aa, Artificial Sequence; identical to SEQ ID NO: 18787
  Synthetic polypeptide representing artificial human antibody VL domain

SEQ ID NO: 19253 - protein, 108 aa, Artificial Sequence; identical to SEQ ID NO: 18838
  Synthetic polypeptide representing artificial human antibody VL domain

SEQ ID NO: 19254 - protein, 107 aa, Artificial Sequence
  Synthetic polypeptide representing artificial human antibody VL domain
EIVMTQSPATLSVSPGERATLSCRASQSVSSNLAWYQQKPGQAPRLLIYGASTRATGIPARFSGSGSGTEFTLTISSLQSEDFAVYYCQQYNNWPLTFGQGTKVEIK

SEQ ID NO: 19255 - protein, 108 aa, Artificial Sequence
  Synthetic polypeptide representing artificial human antibody VL domain
SYVLTQPPSVSVAPGKTARITCGGNNIGSKSVHWYQQKPGQAPVLVVYDDSDRPSGIPERFSGSNSGNTATLTISRVEAGDEADYYCQVWDSSSDSYVFGTGTKVTVL

SEQ ID NO: 19256 - protein, 107 aa, Artificial Sequence
  Synthetic polypeptide representing artificial human antibody VL domain
DIQMTQSPSSLSASVGDRVTITCRASQSISSYLNWYQQKPGKAPKLLIYAASSLQSGVPSRFSGSGSGTDFTLTISSLQPEDFATYYCQQSYSTPDTFGQGTRLEIK

SEQ ID NO: 19257 - protein, 110 aa, Artificial Sequence
  Synthetic polypeptide representing artificial human antibody VL domain
NFMLTQPHSVSESPGKTVTISCTGSSGSIASNYVQWYQQRPGSAPTTVIYEDNQRPSGVPDRFSGSIDSSSNSASLTISGLKTEDEADYYCQSYDSSTWVFGGGTKLTVL

SEQ ID NO: 19258 - protein, 109 aa, Artificial Sequence
  Synthetic polypeptide representing artificial human antibody VL domain
DIQMTQSPSSLSARLGDSVTFTCRTNEDIGDHLNWYQQSPGEAPRLLIYDRSSLESGVPSRFSGSGSGTYFELTVTDVQPEDVGTYYCQSYNNVSPMYIFGRGTTLEIK

SEQ ID NO: 19259 - protein, 107 aa, Artificial Sequence
  Synthetic polypeptide representing artificial human antibody VL domain
SYELTQPPSVSVSPGQTARITCSGDALPKKYAYWYQQKSGQAPVLVIYEDSKRPSGIPERFSGSSSGTMATLTISGAQVEDEADYYCYSTDSSGTRVFGGGTKLTVL

SEQ ID NO: 19260 - protein, 106 aa, Artificial Sequence
  Synthetic polypeptide representing artificial human antibody VL domain
DIQMTQSPSTLSASVGDRVTITCRASQSIRNWLAWYQQKPGTAPKTLIYKASSLASGVPARFSGSGYGTEFTLTISSLQPDDFATYYCLQYNSYWTFGQGTTVEFK

SEQ ID NO: 19261 - protein, 111 aa, Artificial Sequence
  Synthetic polypeptide representing artificial human antibody VL domain
QSALTQPASVSGSPGQSITISCTGTTDDIRDSNFVSWYQQHPGKAPKLIIYDVRDRPPGVSSRFSGSKSGYTASLTISGLQSEDEADYFCGSYSTTTTLGLFGGGTKVTVL

SEQ ID NO: 19262 - protein, 108 aa, Artificial Sequence
  Synthetic polypeptide representing artificial human antibody VL domain
EIVMTQSPATLSVSPGERATLSCRASQSVSSNLAWYQQKPGQAPRLLIYGASTRATGIPARFSGSGSGTEFTLTISSLQSEDFAVYYCQQYNNWPLYTFGQGTKLEIK

SEQ ID NO: 19263 - protein, 111 aa, Artificial Sequence
  Synthetic polypeptide representing artificial human antibody VL domain
QSALTQPASVSGSPGQSITISCTGTSSDVGGYNYVSWYQQHPGKAPKLMIYDVSNRPSGVSNRFSGSKSGNTASLTISGLQAEDEADYYCSSYTSSSTPYVFGTGTKVTVL

SEQ ID NO: 19264 - protein, 107 aa, Artificial Sequence
  Synthetic polypeptide representing artificial human antibody VL domain
AIQVTQSPTSLSASVGDRVTITCRASQGISSALAWYQQKLGKAPKLLIYDASRLESGVPSRFSGSGSGTDFTLTISSLQPEDFATYYCQQFNIFPPHFGGGTKVEIK

SEQ ID NO: 19265 - protein, 110 aa, Artificial Sequence
  Synthetic polypeptide representing artificial human antibody VL domain
QSVLAQPPSASGTPGQRVTISCSGSSSNIGRNYVYWYQQFPGMAPKVLIYRNYERPSGVVDRFSGSKSGTSASLAISGLRSEDEADYYCAAWDDSLSGYLFGPGTKVTVL

SEQ ID NO: 19266 - protein, 110 aa, Artificial Sequence; identical to SEQ ID NO: 18886
  Synthetic polypeptide representing artificial human antibody VL domain

SEQ ID NO: 19267 - protein, 110 aa, Artificial Sequence
  Synthetic polypeptide representing artificial human antibody VL domain
QSVLTQPPSASGTPGQRVTISCSGSSSNIGSNYVYWYQQLPGTAPKLLIYRNNQRPSGVPDRFSGSKSGTSASLAISGLRSEDEADYYCAAWDDSLSGWVFGGGTKLTVL

SEQ ID NO: 19268 - protein, 110 aa, Artificial Sequence; identical to SEQ ID NO: 18969
  Synthetic polypeptide representing artificial human antibody VL domain

SEQ ID NO: 19269 - protein, 108 aa, Artificial Sequence
  Synthetic polypeptide representing artificial human antibody VL domain
EIVLTQSPGTLSLSPGERATLSCRASQSVSSSYLAWYQQKPGQAPRLLIYGASSRATGIPDRFSGSGSGTDFTLTISRLEPEDFAVYYCQQYGSSPQTFGQGTKLEIK

SEQ ID NO: 19270 - protein, 107 aa, Artificial Sequence
  Synthetic polypeptide representing artificial human antibody VL domain
DIQLTQSPSSLSASVGDRVTITCRASQGISSYLAWYQQKPGKAPKLLIYAASTLQSGVPSRFSGSGSGTDFTLTISSLQPEDFATYYCQQLNSYPYTFGQGTKLEIK

SEQ ID NO: 19271 - protein, 110 aa, Artificial Sequence; identical to SEQ ID NO: 19170
  Synthetic polypeptide representing artificial human antibody VL domain

SEQ ID NO: 19272 - protein, 107 aa, Artificial Sequence
  Synthetic polypeptide representing artificial human antibody VL domain
DIQMTQSPSSPSASVGDRVTITCRASQGISNYLAWYQQKPGKVPKLLIYAASTLQSGVPSRFSGSGSGTDFTLTISSLQPEDVATYYCQKYKSAPYTFGQGTKLEIK

SEQ ID NO: 19273 - protein, 107 aa, Artificial Sequence
  Synthetic polypeptide representing artificial human antibody VL domain
DIQMTQSPSSLSASVGDRVTITCQASQDISNYLNWYQQKPGKAPKLLIYDASNLETGVPSRFSGSGSGTDFTFTISSLQPEDIATYYCQQYDNPSITFGQGTRLEIK

SEQ ID NO: 19274 - protein, 108 aa, Artificial Sequence; identical to SEQ ID NO: 18838
  Synthetic polypeptide representing artificial human antibody VL domain

SEQ ID NO: 19275 - protein, 112 aa, Artificial Sequence; identical to SEQ ID NO: 18831
  Synthetic polypeptide representing artificial human antibody VL domain

SEQ ID NO: 19276 - protein, 108 aa, Artificial Sequence
  Synthetic polypeptide representing artificial human antibody VL domain
SYVLTQPPSVSVAPGKTARITCGGNNIGSKSVHWYQQKPGQAPVLVIYYDSDRPSGIPERFSGSNSGNTATLTISRVEAGDEADYYCQVWDSSSDHRVFGGGTKLTVL

SEQ ID NO: 19277 - protein, 103 aa, Artificial Sequence
  Synthetic polypeptide representing artificial human antibody VL domain
EIVLTQSPATLSLSPGERATLSCRASQSVSSYPAWYRQKSGQAPRLLIYDASKRATGIPARFSGSGSGTDFTLTISSLEPEDFAVYYCQHRRTFGQGTKVESK

SEQ ID NO: 19278 - protein, 107 aa, Artificial Sequence; identical to SEQ ID NO: 19234
  Synthetic polypeptide representing artificial human antibody VL domain

SEQ ID NO: 19279 - protein, 108 aa, Artificial Sequence
  Synthetic polypeptide representing artificial human antibody VL domain
SYVLTQPPSVSVAPGKTARITCGGNNIGSKSVHWYQQKPGQAPVLVIYYDSDRPSGIPERFSGSNSGNTATLTISRVEAGDEADYYCQVWDSSSDHVVFGGGTKLTVL

SEQ ID NO: 19280 - protein, 108 aa, Artificial Sequence
  Synthetic polypeptide representing artificial human antibody VL domain
DIEMTQSPSSLSASVGDRVTITCRASQYIRNYLNWYQQKPGKAPKLLIYNASGLQSGVPSRFSGSGSGTDFTLTISSLQPEDFATYYCQQSYSDTRVTFGQGTRLDIK

SEQ ID NO: 19281 - protein, 110 aa, Artificial Sequence
  Synthetic polypeptide representing artificial human antibody VL domain
EIVLTQSPATLSLSPGERATLSCRASQSVSSYLAWYQQKPGQAPRLLIYDASNRATGIPARFSGSGSGTDFTLTISSLEPEDFAVYYCQQRSNWPPGALTFGGGTKVEIK

SEQ ID NO: 19282 - protein, 112 aa, Artificial Sequence
  Synthetic polypeptide representing artificial human antibody VL domain
DVVMTQSPLSLPVTLGQPASISCRSSQSLVYSDGNTYLNWFQQRPGQSPRRLIYKVSNRDSGVPDRFSGSGSGTDFTLKISRVEAEDVGVYYCMQALQTPFTFGPGTKVDIK

SEQ ID NO: 19283 - protein, 112 aa, Artificial Sequence
  Synthetic polypeptide representing artificial human antibody VL domain
DIVMTQSPLSLPVTPGEPASISCRSSQSLLHSNGYNYLDWYLQKPGQSPQLLIYLGSNRASGVPDRFSGSGSGTDFTLKISRVEAEDVGVYYCMQALQTPHTFGQGTKLEIK

SEQ ID NO: 19284 - protein, 108 aa, Artificial Sequence
  Synthetic polypeptide representing artificial human antibody VL domain
DIQMTQSPSSLSASVGDRVTITCRASQSISSYLNWYQQKPGKAPKLLIYAASSLQSGVPSRFSGSGSGTDFTLTISSLQPEDFATYYCQQSYSTLMYTFGQGTKLEIK

SEQ ID NO: 19285 - protein, 107 aa, Artificial Sequence
  Synthetic polypeptide representing artificial human antibody VL domain
SYELTQPPSVSVSPGQTASITCSGDKLGDKYACWYQQKPGQSPVLVIYQDSKRPSGIPERFSGSNSGNTATLTISGTQAMDEADYYCQAWDSSTNYVFGTGTKVTVL

SEQ ID NO: 19286 - protein, 108 aa, Artificial Sequence; identical to SEQ ID NO: 19229
  Synthetic polypeptide representing artificial human antibody VL domain

SEQ ID NO: 19287 - protein, 109 aa, Artificial Sequence
  Synthetic polypeptide representing artificial human antibody VL domain
QSVLTQPPSASGTPGQRVTISCSGSSSNIGSNYVYWYQQLPGTAPKLLIYRNNQRPSGVPDRFSGSKSGTSASLAISGLRSEDEADYYCAAWDDSLSGPFGGGTKLTVL

SEQ ID NO: 19288 - protein, 107 aa, Artificial Sequence
  Synthetic polypeptide representing artificial human antibody VL domain
DIQMTQSPSSLSASVGDRVTITCRASQGISNYLAWYQQKPGKVPKLLIYAASTLQSGVPSRFSGSGSGTDFTLTISSLQPEDVATYYCQKYNSAPWTFGQGTKVEIK

SEQ ID NO: 19289 - protein, 107 aa, Artificial Sequence
  Synthetic polypeptide representing artificial human antibody VL domain
DIQMTQSPSSLSASVGDRVTITCQASQDISNYLNWYQQKPGKAPKLLIYDASNLETGVPSRFSGSGSGTDFTFTISSLQPEDIATYYCQQHDNLPLTFGGGTKVEIK

SEQ ID NO: 19290 - protein, 107 aa, Artificial Sequence; identical to SEQ ID NO: 19155
  Synthetic polypeptide representing artificial human antibody VL domain

SEQ ID NO: 19291 - protein, 107 aa, Artificial Sequence
  Synthetic polypeptide representing artificial human antibody VL domain
DIQMTQSPSSVSASVGDRVTITCRASQGISSWLAWYQQKPGKAPKLLIYAASSLQSGVPSRFSGSGSGTDFTLTISSLQPEDFATYYCQQANSFPLTFGGGTKVEIK

SEQ ID NO: 19292 - protein, 108 aa, Artificial Sequence
  Synthetic polypeptide representing artificial human antibody VL domain
EIVLTQSPGTLSLSPGERATLSCRASQSVSSSYLAWYQQKPGQAPRLLIYGASSRATGIPDRFSGSGSGTDFTLTISRLEPEDFAVYYCQQYGSSLYTFGQGTKLEIK

SEQ ID NO: 19293 - protein, 110 aa, Artificial Sequence
  Synthetic polypeptide representing artificial human antibody VL domain
SYELTQPPSVSVSPGQTARITCSGDALPKQYAYWYQQKPGQAPVLVIYKDSERPSGIPERFSGSSSGTTVTLTISGVQAEDEADYYCQSADSSGTYPNWVFGGGTKLTVL

SEQ ID NO: 19294 - protein, 107 aa, Artificial Sequence
  Synthetic polypeptide representing artificial human antibody VL domain
DIQMTQSPSSLSASVGDRVTITCQASQDISNYLNWYQQKPGKAPKLLIYDASNLETGVPSRFSGSGSGTDFTFTISSLQPEDIATYYCQQYDNLMYTFGQGTKLEIK

SEQ ID NO: 19295 - protein, 111 aa, Artificial Sequence
  Synthetic polypeptide representing artificial human antibody VL domain
QSALTQPASVSGSPGQSITISCTGTSSDVGSYNLVSWYQQHPGKAPKLMIYEVSKRPSGVSNRFSGSKSGNTASLTISGLQAEDEADYYCCSYAGSSTSLVFGGGTKLTVL

SEQ ID NO: 19296 - protein, 110 aa, Artificial Sequence; identical to SEQ ID NO: 19136
  Synthetic polypeptide representing artificial human antibody VL domain

SEQ ID NO: 19297 - protein, 106 aa, Artificial Sequence
  Synthetic polypeptide representing artificial human antibody VL domain
DILMTQSPSSLSASVGDRVTITCQASQDISNHLNWYQQKPGKAPKFLIYDVSNLEKGVPSRFSGSGSGTDFTFTISSLQPEDVGTYYCQQYDNLRTFGQGTKVEIK

SEQ ID NO: 19298 - protein, 107 aa, Artificial Sequence; identical to SEQ ID NO: 18788
  Synthetic polypeptide representing artificial human antibody VL domain

SEQ ID NO: 19299 - protein, 112 aa, Artificial Sequence
  Synthetic polypeptide representing artificial human antibody VL domain
DIVMTQSPLSLPVTPGEPASISCRSSQSLLHSNGYNYLAWYLQKPGQSPQLLIYLGSRRASGVPDRFSGSGSGTDFTLKISRVEADDVGVYYCMEGLQTPPTFAGGTKVEIK

SEQ ID NO: 19300 - protein, 103 aa, Artificial Sequence
  Synthetic polypeptide representing artificial human antibody VL domain
DIQMTQSPSSLAASVGDRVVVTCQASQDIDNHLNWYQQKPGRAPKLLIYDASNLETGVPSRFSGSGFGTEFTFTISSLQPEDIGVYYCQQRGPFGPGTRVGIK

SEQ ID NO: 19301 - protein, 107 aa, Artificial Sequence
  Synthetic polypeptide representing artificial human antibody VL domain
DIQMTQSPSSLSASIGDRVTITCRASQSISRSLNWYQHTPGKAPKLLIYTASTLQSGVPSRFSGDGSGTDFTLTISSVQPEDFGTYYCQQNYRNPQTFGQGTKVEIK

SEQ ID NO: 19302 - protein, 108 aa, Artificial Sequence
  Synthetic polypeptide representing artificial human antibody VL domain
EIVLTQSPGTLSLSPGERATLSCRASQSLTGNYLAWYRQSPGQAPRLLIYGASRRPAGSPGRFSGSGSGTDFTLTISSLEPEDFAVYYCQQYSSLPRTFGQGTRVDIK

SEQ ID NO: 19303 - protein, 108 aa, Artificial Sequence
  Synthetic polypeptide representing artificial human antibody VL domain
SYVLTQPPSVSVAPGKTARITCGGNNIGSKSVHWYQQKPGQAPVLVVYDDSDRPSGIPERFSGSNSGNTATLTISRVEAGDEADYYCQVWDSSSDHGVFGGGTKLTVL

SEQ ID NO: 19304 - protein, 106 aa, Artificial Sequence; identical to SEQ ID NO: 18811
  Synthetic polypeptide representing artificial human antibody VL domain

SEQ ID NO: 19305 - protein, 107 aa, Artificial Sequence
  Synthetic polypeptide representing artificial human antibody VL domain
DIQMTQSPSSLSASVGDRVNITCQASQDIKNYLNWYQETPGKAPKLLIYDATNLETGVPSRFSGSGSGTDFTFTISSLQPEDVATYYCHQYDNLPFTFGPGTRVDFK

SEQ ID NO: 19306 - protein, 109 aa, Artificial Sequence
  Synthetic polypeptide representing artificial human antibody VL domain
SSELTQDPAVSVALGQTVRITCQGDSLRSYYASWYQQKPGQAPVLVIYGKNNRPSGIPDRFSGSSSGNTASLTITGAQAEDEADYYCNSRDSSGNHLYVFGTGTKVTVL

SEQ ID NO: 19307 - protein, 108 aa, Artificial Sequence; identical to SEQ ID NO: 19232
  Synthetic polypeptide representing artificial human antibody VL domain

SEQ ID NO: 19308 - protein, 113 aa, Artificial Sequence
  Synthetic polypeptide representing artificial human antibody VL domain
DVVMTQSPLSLPVTPGEPASISCRSSQSLVYSDGNTYLNWFQQRPGQSPRRLIYKVSNRDSGVPDRFSGSGSGTDFTLKISRVEAEDVGVYYCMQGTHWPPCTFGGGTKVEIK

SEQ ID NO: 19309 - protein, 107 aa, Artificial Sequence
  Synthetic polypeptide representing artificial human antibody VL domain
SYELTQPPSVSVSPGQTASITCSGDKLGDKYACWYQQKPGQSPVLVIYQDSKRPSGIPERFSGSNSGNTATLTISGTQAMDEADYYCQAWDSSTAWVFGGGTKLTVL

SEQ ID NO: 19310 - protein, 110 aa, Artificial Sequence
  Synthetic polypeptide representing artificial human antibody VL domain
QSVLTQPPSASGTPGQTVTISCSGSRSNIGNSFVNWYQQVPGMSPRLLIYSNTHRPSGVPDRFSGSRSGTSASLAISGLQSEDEAVYYCGSWDSLNALFVFGTGTKVSVL

SEQ ID NO: 19311 - protein, 107 aa, Artificial Sequence
  Synthetic polypeptide representing artificial human antibody VL domain
EIVLTQSPGTLSLSPGEKATLSCRASQSVPNNDVAWYQHKPGQAPRLLIYGASIRVPGIPDRFSGGGSGTDFTLSISRLEPEDFAVFYCHQYGSSHTFGGGTKVEMK

SEQ ID NO: 19312 - protein, 107 aa, Artificial Sequence
  Synthetic polypeptide representing artificial human antibody VL domain
DIQMTQSPSSVSASVGDRVTMTCRASQGISTWLAWYQQKPGKAPKLLIYAASTLQSGVPSRFSGSGSGTEFTLTISSLQPEDFATYYCQQANSFPRTFGGGTKVEIK

SEQ ID NO: 19313 - protein, 108 aa, Artificial Sequence
  Synthetic polypeptide representing artificial human antibody VL domain
EIVLTQSPGTLSLSPGDRATLSCRASQSVTTTYFAWYQQKPGQAPRLLINGASNRASGIPDRFSGSGSGTDFTLTISRLEPEDFAVYYCLQGGSSPLTFGGGTRVEIK

SEQ ID NO: 19314 - protein, 108 aa, Artificial Sequence; identical to SEQ ID NO: 19078
  Synthetic polypeptide representing artificial human antibody VL domain

SEQ ID NO: 19315 - protein, 109 aa, Artificial Sequence; identical to SEQ ID NO: 18848
  Synthetic polypeptide representing artificial human antibody VL domain

SEQ ID NO: 19316 - protein, 107 aa, Artificial Sequence
  Synthetic polypeptide representing artificial human antibody VL domain
DIQMTQNPSTLSAFVGDRVAITCRASQSITTWLAWFQQKPGRAPKLLIYRASTLESGVPSRFSGTGSGTDFSLTITSLQPDDFATYYCLQYDTSPYTFGQGTKLEIK

SEQ ID NO: 19317 - protein, 110 aa, Artificial Sequence
  Synthetic polypeptide representing artificial human antibody VL domain
QSMLTQPPSASGTPGQRVTISCSGSSSNIGSGTVNWYQRLPGTAPKVVIYSNNQRPSGVPDRFSGSKSGTSASLAISGLQSEDEGDYFCAAWDDSLSGPVFGGGTKVTVL

SEQ ID NO: 19318 - protein, 107 aa, Artificial Sequence
  Synthetic polypeptide representing artificial human antibody VL domain
AIQLTQSPSSLSASVGDRVTFTCRASQGISSTLAWYQQKPGKAPKLLIYDASTLESGVPSRFIGSGSGTDFTLTISSLQPEDFATYFCQQFNNYPVTFGGGTRVEIK

SEQ ID NO: 19319 - protein, 108 aa, Artificial Sequence
  Synthetic polypeptide representing artificial human antibody VL domain
EIVLTQSPVTVSLSPGDTATLSCRASQGIATHLAWYQQKPGQAPRLLISDASNRATGIPARFSGSGSGTDFTLTISSLEPEDSAVYYCQQRYNWPPLTFGGGTKVEIK

SEQ ID NO: 19320 - protein, 106 aa, Artificial Sequence
  Synthetic polypeptide representing artificial human antibody VL domain
EIVLTQSPATLSLSPGDRATLSCRASQSVGHYLAWYQQKPGQAPRLLIVDASRRATGIPARFSGSGSGTDFTLTIRSLEPEDFAVYYCQQRSTWHTFGQGTRLEIK

SEQ ID NO: 19321 - protein, 108 aa, Artificial Sequence
  Synthetic polypeptide representing artificial human antibody VL domain
SSELTQDPAVSVALGQTVRITCQGDSLRSGYAAWYQQKPGQAPLLVIGGKNNRPSGIPDRFSGSTSGNTASLTITGAQAEDDADYYCNSRDNSGDHYVFGAGTKVTVL

SEQ ID NO: 19322 - protein, 112 aa, Artificial Sequence
  Synthetic polypeptide representing artificial human antibody VL domain
DVVMTHSPLSLSVTLGQPASISCTSSRSLVYSDGNTHLHWFHQRPGQSPRRLIYRVSRRDSGVPDRFSGSGSGTYFTLNISRVEAEDVGIFYCMQGTHWPPTFGQGTKVEIK

SEQ ID NO: 19323 - protein, 109 aa, Artificial Sequence
  Synthetic polypeptide representing artificial human antibody VL domain
EIVLTQSPGTLSLSPGERATLSCRASQSVNIRFLDWYQQKPGQAPRLLIYSTSSRATGIPDRFSGSGSGTDFTLTISRLEPEDFAVYFCQQYTSSPPYTFGQGTKLEIK

SEQ ID NO: 19324 - protein, 107 aa, Artificial Sequence
  Synthetic polypeptide representing artificial human antibody VL domain
DIQMTQSPSFLAASIGDRVTLTCRAGRTISNYVNWYQKKPGKAPKLLIYGASTLHSGVPSTFSGSGSGTDFTLTISSLKLEDVATYYCQQLDSVPPTFGGGTKVEIK

SEQ ID NO: 19325 - protein, 112 aa, Artificial Sequence
  Synthetic polypeptide representing artificial human antibody VL domain
DIVMTQTPLSLSVTPGQPASISCKSSQSLLHSDGKTYLYWYLQKPGQSPQLLIYEVSSRFSGVPDRFSGSGSGTDFTLKISRVEAEDVGVYYCMQGIHLPITFGQGTRLEIK

SEQ ID NO: 19326 - protein, 107 aa, Artificial Sequence
  Synthetic polypeptide representing artificial human antibody VL domain
DIQMTQSPSSLSASVGDRVTITCRASQGISKYLAWYQQKPGKVPNLLIYAASTLRSGVPSRFRGSGSGTDFTLTITSLQPEDVATYYCQKYERAPLTFGGGTKVEIK

SEQ ID NO: 19327 - protein, 110 aa, Artificial Sequence
  Synthetic polypeptide representing artificial human antibody VL domain
QSALTQPASVSGSPGQSITISCTVTRSDVGGYKYVSWYQQHPGKAPKLLIYEVTNRPSGVSNRFSGSKSGNTASLTVSGLQAEDEADYYCSSYAGSNTGVFGGGTKLTVL

SEQ ID NO: 19328 - protein, 107 aa, Artificial Sequence
  Synthetic polypeptide representing artificial human antibody VL domain
DIQMTQSPSSLSASVGDRVTITCRASQDIRNYIAWYQQRSGEVPKLLIWGASNLQSGVPSRFSGSGSGTVFTFAINGLRPEDVGSYYCQTYGSAPPMFGQGTRVDLK

SEQ ID NO: 19329 - protein, 107 aa, Artificial Sequence
  Synthetic polypeptide representing artificial human antibody VL domain
EIVLTQSPATLPLSPGESATLSCRASQSVNRHLAWYQQRPGQAPRLLIYDASKWATDIPARFSGSGSGTDYILTISSLEPEDFAVYYCQQYKNWPLTFGGGSKVEIK

SEQ ID NO: 19330 - protein, 112 aa, Artificial Sequence
  Synthetic polypeptide representing artificial human antibody VL domain
DIVMTQSPLSLPVTPGEPASISCRSSQSLLKSDGYHYLDWYLQKPGQSPQLLIYKGFNRASGVPDRFSGSGSGTDFTLKISRVEAEDAGVYYCMQALQNPWTFGQGTNVDIK

SEQ ID NO: 19331 - protein, 109 aa, Artificial Sequence
  Synthetic polypeptide representing artificial human antibody VL domain
QAVVTQEPSVTVSPGGTVTLTCASSTGGVTSGHIPYWFQQKPGQAPRTLIFDTSNKYSWTPARFSGSLLGGKAALTLSGAQPDDEAEYYCSLGYGDARVFGGGTKLTVL

SEQ ID NO: 19332 - protein, 107 aa, Artificial Sequence
  Synthetic polypeptide representing artificial human antibody VL domain
DIQVTQSPSSLSASVGDRVTITCRASQSIANYLNWYQKKPGKAPELLIYAASKLQSGVTSRFSGSGSGTDFTLTIYSLQPEDFATYYCQQTHSKLWTFGQGTTVEIK

SEQ ID NO: 19333 - protein, 110 aa, Artificial Sequence
  Synthetic polypeptide representing artificial human antibody VL domain
QTVVTQEPSFSVSPGETVTLTCGLTSGSVSTNNFPSWYQQTPGQAPRTLISKTETRSSGVPDRFSGSIVGSKAALTITGAQADDESDYYCILYLGPGSWVFGGGTRLTVL

SEQ ID NO: 19334 - protein, 110 aa, Artificial Sequence
  Synthetic polypeptide representing artificial human antibody VL domain
QSALTQPPSASGSPGQSVTISCTGTSSDVGGYNYVSWYQQYPGEAPKLMIFDVSKRPSGVPDRFSGSKSGNTASLTVSGLQAEDEADYYCSSYAGSNNVLFGGGTKLTVL

SEQ ID NO: 19335 - protein, 106 aa, Artificial Sequence
  Synthetic polypeptide representing artificial human antibody VL domain
DIQMTQSPSSLSASVGDRVTITCRASQSISSYLNWYQQKPGKAPKLLIYAASSLQSGVPSRFSGSGSGTDFTLTISSLQPEDFATYYCQQSYTTLTFGPGTKVDIK

SEQ ID NO: 19336 - protein, 112 aa, Artificial Sequence
  Synthetic polypeptide representing artificial human antibody VL domain
DIVMTQSPLSLPVTPGEPASISCRSSQSLLHSNGYNFVDWYLQKPGQSPQLLIYKGFIRASGVPDRFSGSGSGTDFTLKISRVEAEDAGVYYCMQALQNPWTFGQGTNVDIK

SEQ ID NO: 19337 - protein, 107 aa, Artificial Sequence
  Synthetic polypeptide representing artificial human antibody VL domain
EIVMTQSPATLSVSPGERATLSCRASENVINNLAWFQQKPGQAPRLVIYGVSTRATGIPGRFSGSGSGTEFTLTISSLQSEDFAVYYCLQTNNWPFTFGPGTKVDVK

SEQ ID NO: 19338 - protein, 110 aa, Artificial Sequence
  Synthetic polypeptide representing artificial human antibody VL domain
SSELTQDPAVSVALGQTVRITCQGDSLRSYYANWYQQKPGQAPVLVIYGKNNRPSGIPDRFSGSSSGNTASLTITGAQAEDEADYYCNSRDSSGNHLRWVFGGGTKLTVL

SEQ ID NO: 19339 - protein, 108 aa, Artificial Sequence
  Synthetic polypeptide representing artificial human antibody VL domain
SYVLTQPPSVSVAPGKTARITCGGDNIGRKSVNWYQQRPGQAPVVVIYEDNARPSGIPERLSGSNSANTATLTISRAEAGDEADYYCHVWDDSSDHHVFGGGTKLTVL

SEQ ID NO: 19340 - protein, 112 aa, Artificial Sequence
  Synthetic polypeptide representing artificial human antibody VL domain
DIVMTQTPLSSPVTLGQPASISCRSSQSLVHSDGNTYLNWLHQRPGQPPRLLIYKISNRFPGVPDRFSGSGAGTDFTLEISRVEPEDVGIYYCTQVTQFPFTFGPGTRVDIK

SEQ ID NO: 19341 - protein, 110 aa, Artificial Sequence
  Synthetic polypeptide representing artificial human antibody VL domain
QSVLTQPPSVSATPGQKVTISCFGSSSNIGNNYVSWYQHFPGRAPKLLIYDNFRRPSGIPDRFSCSKSGTSATLDITGLQAGDEAVYYCGAWDTSLTVMMFGGGTTLTVL

SEQ ID NO: 19342 - protein, 107 aa, Artificial Sequence
  Synthetic polypeptide representing artificial human antibody VL domain
EIVLTQSPATLSLSPEERASLSCRASQSINTDLAWYQQKPGQPPRLLIFDASNRATGIPARFSGSGSGTDFTLTISSLEPEDFAVYYCQQRNSWPRTFGQGTKVEIK

SEQ ID NO: 19343 - protein, 107 aa, Artificial Sequence
  Synthetic polypeptide representing artificial human antibody VL domain
SYELTQPPSVSVSPGQTASITCSGDKLGDKYACWYQQKPGQSPVLVIYQDSKRPSGIPERFSGSNSGNTATLTISGTQAMDEADYYCQAWDSSTDVVFGGGTKLTVL

SEQ ID NO: 19344 - protein, 108 aa, Artificial Sequence; identical to SEQ ID NO: 19011
  Synthetic polypeptide representing artificial human antibody VL domain

SEQ ID NO: 19345 - protein, 107 aa, Artificial Sequence; identical to SEQ ID NO: 18857
  Synthetic polypeptide representing artificial human antibody VL domain

SEQ ID NO: 19346 - protein, 112 aa, Artificial Sequence
  Synthetic polypeptide representing artificial human antibody VL domain
DIVMTQSPLSLAVTPGEPASVSCRSSQSLLHRNGYNYLDWYLQKPGQSPQLLIYWGSSRAPGVPDRFSASGSGTDFTLKISRVEAEDVGVYYCMQALQPPLAFGGGTKLEIK

SEQ ID NO: 19347 - protein, 108 aa, Artificial Sequence; identical to SEQ ID NO: 18787
  Synthetic polypeptide representing artificial human antibody VL domain

SEQ ID NO: 19348 - protein, 107 aa, Artificial Sequence
  Synthetic polypeptide representing artificial human antibody VL domain
EIVMTQSPATLSVSPGERATLSCRASQSVSSNLAWYQQKPGQAPRLLIYGASTRATGIPARFSGSGSGTEFTLTISSLQSEDFAVYYCQQYNNWPRTFGQGTRLEIK

SEQ ID NO: 19349 - protein, 110 aa, Artificial Sequence
  Synthetic polypeptide representing artificial human antibody VL domain
QSVLTQPPSASGTPGQRVTISCSGSSSNIENHNVYWYQQFPGTAPKLLIYRNNQRPSGVPDRFSGSKSGTSASLAISGLRSDDEADYYCAAWDDSLSGRVFGGGTELTVL

SEQ ID NO: 19350 - protein, 108 aa, Artificial Sequence
  Synthetic polypeptide representing artificial human antibody VL domain
SYELTQPPSVSVAPGQTARITCIGDALSKQYAYWYQQKPGQAPLVVIFKDTERPSGIPERFSGSSSGTTVTLTISGAQAEDEADYYCQSADITDTYVVFGGGTKLTVL

SEQ ID NO: 19351 - protein, 111 aa, Artificial Sequence
  Synthetic polypeptide representing artificial human antibody VL domain
NFMLTQPHSVSESPGKTVTISCTRSSGSIASNYVQWYQQRPGSAPTTVIYEDNQRPSGVPDRFSGSIDSSSNSASLTISGLKTEDEADYYCQSYDSSNCWVFGGGTKLTVL

SEQ ID NO: 19352 - protein, 111 aa, Artificial Sequence
  Synthetic polypeptide representing artificial human antibody VL domain
QSVLTQPPSVSGAPGQRVTISCTGSSSNIGAGYDVHWYQQLPGTAPKLLIYGNSNRPSGVPDRFSGSKSGTSASLAITGLQAEDEADYYCQSYDSSLSGWVFGGGTKLTVL

SEQ ID NO: 19353 - protein, 111 aa, Artificial Sequence
  Synthetic polypeptide representing artificial human antibody VL domain
QLVLTQSPSASASLGASVKLTCTLTSGRWNYAIAWHQQQPGKGPRFLMKINSDGSHNRGDGIPDRFSGSSSGAERYLIISRLHSDDEADYYCQTWGPGFQVFGGGTKVTVL

SEQ ID NO: 19354 - protein, 113 aa, Artificial Sequence
  Synthetic polypeptide representing artificial human antibody VL domain
DVVMTQSPLSLPVTLGQPASISCRSSQSLVHSDGNTYLNWFQQRPGQSPRRLIYKVSNRDSGVPDRFSGSGSGTDFTLKISRVEAEDVGVYYCMQGTHWPPYTFGQGTKLEIK

SEQ ID NO: 19355 - protein, 107 aa, Artificial Sequence
  Synthetic polypeptide representing artificial human antibody VL domain
DIQMTQSPPSLSASVGDLVTITCRASQGIADSLAWYQQKPGKAPKLLLYAASRLERGVPSRFSGSGSVTDYTLTIGSLQPEDFATYYCQQYYSIPWTFGQGTKVEIK

SEQ ID NO: 19356 - protein, 107 aa, Artificial Sequence
  Synthetic polypeptide representing artificial human antibody VL domain
AIQMTQSPPSLSASVGDRVTITCRASQGIGTDLGWYQQKPGKAPKLLIYTTSSLESGVPSRFSGSGSGTDFTLTISSLQPEDFATYYCLQDYNYPYTFGQGTKLEIK

SEQ ID NO: 19357 - protein, 108 aa, Artificial Sequence
  Synthetic polypeptide representing artificial human antibody VL domain
EIVLTQSPGTLSLSPGERAILSCRASQTVRTSYLAWHQHKPGQAPRLLFFGAATRAPGIPDRFTGSASGTVFTLTISRLEPEDFAVYYCQQYGRSPFTFGQGTKLEIK

SEQ ID NO: 19358 - protein, 106 aa, Artificial Sequence
  Synthetic polypeptide representing artificial human antibody VL domain
DIQMTQSPSSLSASVGDRVTITCRASQSISSYLNWYQQKPGKAPKLLIYAASSLQSGVPSRFSGSGSGTDFTLTISSLQPEDFATYYCQQSYSPFAFGPGTKVDIK

SEQ ID NO: 19359 - protein, 108 aa, Artificial Sequence
  Synthetic polypeptide representing artificial human antibody VL domain
EIELTQSPGTLSLSPGERATLSCRASQSVGSSFLAWYQQKAGQAPRLLIYGTSSRATGIPDRFSASGSETDFTLTISKLEPEDFAVYYCQQYVDSPWTFGQGTKVEIK

SEQ ID NO: 19360 - protein, 108 aa, Artificial Sequence
  Synthetic polypeptide representing artificial human antibody VL domain
EIVLTQSPGTLSLSPGEGATLSCRASQSVSSNYLAWYQQKTGQAPRLLIYGASNRATGIPDRFTGGGSGTDFTLTIGRLEPADFAMYYCQQYGSTPYTFGQGTKLDIK

SEQ ID NO: 19361 - protein, 106 aa, Artificial Sequence
  Synthetic polypeptide representing artificial human antibody VL domain
EIVMTQSPATLSVSPGERATLSCRASQSVSSNLAWYQQKPGQAPRLLIYGASTRATGIPARFSGSGSGTEFTLTISSLQSEDFAVYYCQQYNNWLTFGGGTKVEIK

SEQ ID NO: 19362 - protein, 109 aa, Artificial Sequence
  Synthetic polypeptide representing artificial human antibody VL domain
DIQVTQSPPSLSASVGDRVTITCRTSQSISYSLNWYQQKPGKAPKLLIFAASTLQSGVPSRFSGSGSGTDFTLTITSLQPEDFATYYCQQSYSAPPVDSFGQGTKVEIK

SEQ ID NO: 19363 - protein, 106 aa, Artificial Sequence; identical to SEQ ID NO: 18833
  Synthetic polypeptide representing artificial human antibody VL domain

SEQ ID NO: 19364 - protein, 108 aa, Artificial Sequence
  Synthetic polypeptide representing artificial human antibody VL domain
DIQMTQSPSTLSASVGDRVTITCRASQSISKWLAWFQQKPGRAPKLLMYEASTLENGVPSRFSGSGSGTEFTLTINCLQPDDFATYYCQQYSDYSRGTFGQGTKVEIK

SEQ ID NO: 19365 - protein, 108 aa, Artificial Sequence
  Synthetic polypeptide representing artificial human antibody VL domain
DIQMTQSPSSLSASVGDSVTITCRASQTINSYLNWYQQRPGKAPKLLIYAASSLQGGVPSRFSGSGSGTDFTLTISSLQPEDFATYYCQQSYITPPITFGQGTRLQIK

SEQ ID NO: 19366 - protein, 108 aa, Artificial Sequence
  Synthetic polypeptide representing artificial human antibody VL domain
SYVLTQPPSVSVAPGKTARITCGGNNIGSKSVHWYQQKPGQAPVLVIYYDSDRPSGIPERFSGSNSGNTATLTISRVEAGDEADYYCQVWDSSSDHWVFGGGTKLTVL

SEQ ID NO: 19367 - protein, 110 aa, Artificial Sequence; identical to SEQ ID NO: 19170
  Synthetic polypeptide representing artificial human antibody VL domain

SEQ ID NO: 19368 - protein, 106 aa, Artificial Sequence; identical to SEQ ID NO: 18811
  Synthetic polypeptide representing artificial human antibody VL domain

SEQ ID NO: 19369 - protein, 108 aa, Artificial Sequence
  Synthetic polypeptide representing artificial human antibody VL domain
SSELTQNPAVSVALGHTVTITCQGDTLRTSYANWYQQRPGQAPVLVFYGEDSRPSGIPDRFSGSFSEDTASLTITGAQTEDEADYYCNLWDNSSNHWLFGGGTKLTVL

SEQ ID NO: 19370 - protein, 108 aa, Artificial Sequence
  Synthetic polypeptide representing artificial human antibody VL domain
SYELTQPPSVSVSPGQTARITCSGDALPKQYAYWYQQKPGQAPVLVIYKDSERPSGIPERFSGSSSGTTVTLTISGVQAEDEADYYCQSADSSGTRYVFGTGTKVTVL

SEQ ID NO: 19371 - protein, 113 aa, Artificial Sequence
  Synthetic polypeptide representing artificial human antibody VL domain
DIVMTQSPDSLAVSLGERATINCKSSQSILYSSNNKNYLAWYQQKPGQPPKLLFYWASTRESGVPDRFSGSGSGTDFTLTISSLQAEDVAVYYCQQHYTIPSTFGQGTKLEIK

SEQ ID NO: 19372 - protein, 110 aa, Artificial Sequence
  Synthetic polypeptide representing artificial human antibody VL domain
QSILTQPPSVSAAPGQKVSISCSGSSSNIGNDYVSWYQQVPGAAPKLLIYDVDKRPSGIPDRFSGSKSGTSATLDITGLQTGDEADYYCAAWDNNLSGGVFGGGTKLTVL

SEQ ID NO: 19373 - protein, 110 aa, Artificial Sequence; identical to SEQ ID NO: 18903
  Synthetic polypeptide representing artificial human antibody VL domain

SEQ ID NO: 19374 - protein, 106 aa, Artificial Sequence
  Synthetic polypeptide representing artificial human antibody VL domain
SYELTQPPSMSVSPGQTARITCSGDKLGIKYASWYQQKPGQSPVLVIYQDRKRPSGIPERFSGSNSGHTATLTISGTQAMDEADYSCQAWDSSIVAFGGGTKLTVL

SEQ ID NO: 19375 - protein, 116 aa, Artificial Sequence
  Synthetic polypeptide representing artificial human antibody VL domain
QPVLTQPPSASASLGASVTLTCTLSSGYSNYKVDWYQQRPGKGPRFVMRVGTGGIVGSKGDGIPDRFSVLGSGLNRYLTIKNIQEEDESDYHCGADHGSGSNFVWVFGGGTKLTVL

SEQ ID NO: 19376 - protein, 107 aa, Artificial Sequence
  Synthetic polypeptide representing artificial human antibody VL domain
DIQMTQSPSTLAASVGDRVTITCRASQSVGFWLAWYQQKPGKAPNLLIYKASTLQSGVPSRFSGSGSGTAFTLTISSLQPDDFATYYCQQYNSYSRTFGQGTKVEIK

SEQ ID NO: 19377 - protein, 112 aa, Artificial Sequence
  Synthetic polypeptide representing artificial human antibody VL domain
QSALTQPASVSGSPGQSISITCTGTRSDVGAYNSVFWYQQHPGRAPKLIILNVTNRPSGVSNRFSGSKSGNTASLTISGLQTEDEADYYCSSYTSRSTLEVIFGGGTKLTVL

SEQ ID NO: 19378 - protein, 112 aa, Artificial Sequence
  Synthetic polypeptide representing artificial human antibody VL domain
QSVLTQPPSVSGAPGQRVTISCTGNSSNIGAPYDVHWYQRLPGTAPKLLIFSNNNRPSGVPDRFSGSKSGTSASLAITGLQAEDEADYYCQSYDSSLTRYWVFGGGTKLTVL

SEQ ID NO: 19379 - protein, 110 aa, Artificial Sequence
  Synthetic polypeptide representing artificial human antibody VL domain
QSVLTQPPSVSGAPGQRVTISCTGDSFNIGAGYDVHWYQQLPGTAPKLLIYGDNNRPSGVVDRFSGSKSGTSASLAITGLQAEDEADYYCQSYDTRMREVFGGGTKLTVL

SEQ ID NO: 19380 - protein, 109 aa, Artificial Sequence
  Synthetic polypeptide representing artificial human antibody VL domain
QAVVTQEPSLTVSPGGTVTLTCGSSTGPVTFGHYPYWLQQNPGQAPRTLIYDTYSKHSWTPARFSGSLLGGKAALTLSGAQPEDEAEYYCSLYYSGMRVFGGGTKLTVL

SEQ ID NO: 19381 - protein, 112 aa, Artificial Sequence
  Synthetic polypeptide representing artificial human antibody VL domain
DVVMTQSPLSLPVTLGQPASISCRSSQSLVHSDGNTYLNWFQQRPGQSPRRLIYKVSNRDSGVPDRFSGSGSGTDFTLKISRVEAEDVGVYYCMQPTHWPWTFGQGTKVEIK

SEQ ID NO: 19382 - protein, 107 aa, Artificial Sequence
  Synthetic polypeptide representing artificial human antibody VL domain
EIVMTQSPATLSVSPGERVTLSCRASQSVRSHLAWYQHKPGQAPRLLIYEASTRATGIPLRFSGSGSGTEFTLTISSLQSEDFAVYYCQKYYDWPLIFGGGTKVEIK

SEQ ID NO: 19383 - protein, 106 aa, Artificial Sequence
  Synthetic polypeptide representing artificial human antibody VL domain
SYEVTQPPSVSVSPGQTASITCSGDKLATKYTCWYQQKPGQSPVLVIYRDKERPSGIPERFSGSSSGNTATLTITGTQAMDEADYYCQAWDSRTWVFGGGTHLTVL

SEQ ID NO: 19384 - protein, 107 aa, Artificial Sequence
  Synthetic polypeptide representing artificial human antibody VL domain
DIQMTQSPSSLSASVGDRVTITCRASLSISSHLHWYQQKPGTAPKLLIYLASNLESGVPSRFSGSGSGTDFTLTISSLQPEDFATYYCQQSYSAPFTFGPGTKVEIK

SEQ ID NO: 19385 - protein, 108 aa, Artificial Sequence
  Synthetic polypeptide representing artificial human antibody VL domain
SSELTQDPAVSVALGQTVTITCQGDSLRSYYASWFQQKPGQAPVLVIYGKNKRPSGISDRFSGSSPGNTASLTITGAQAEDEAVYYCNSRDSSGDHYVFGPGTKVTVL

SEQ ID NO: 19386 - protein, 108 aa, Artificial Sequence
  Synthetic polypeptide representing artificial human antibody VL domain
SSELTQDPAVSVALGQTVTITCQGDSLRSYYASWFQQKPGQAPALVIYGKNKRPSGISDRFSGSSPGNTASLTITGAQAEDEAVYYCNSRDSSGDHYVFGAGTKVTVL

SEQ ID NO: 19387 - protein, 108 aa, Artificial Sequence
  Synthetic polypeptide representing artificial human antibody VL domain
EIVLTQSPATLSLSPGERATLSCRASQTISSTQLAWYQQKPGQAPRLLIYAASYRATDIPARFSGGGSGTDFTLDISSLEPEDFAVYYCHQRSDWPITFGQGTRLEIK

SEQ ID NO: 19388 - protein, 108 aa, Artificial Sequence
  Synthetic polypeptide representing artificial human antibody VL domain
SYDLTQPPSVSVSPGQTASITCSGDQLGDKFAAWYQQKPGQSPVLVIYQDAKRPSGIPERFSGSNSGNTATLTISGTQAMDEADYYCLVWDSGASAYVFGTGSQVTVL

SEQ ID NO: 19389 - protein, 107 aa, Artificial Sequence
  Synthetic polypeptide representing artificial human antibody VL domain
DIQMTQSPSSLSASVGDRVTITCRASQGIRNGLGWFQQRPGKAPKRLIHSASTLEGGVPSTFSGSGSGTEFTLTISSLQPDDFATYYCLHHGSFPYTFGQGTKVEIK

SEQ ID NO: 19390 - protein, 107 aa, Artificial Sequence
  Synthetic polypeptide representing artificial human antibody VL domain
DIQLTQSPSSLSASVGDRVTITCRASQGIRNALGWFQQRPGKAPKRLIHSASTLEGGVPSTFSGSGSGTEFTLTISSLQPDDFATYYCLHHGSFPYTFGQGTKVEIK

SEQ ID NO: 19391 - protein, 106 aa, Artificial Sequence
  Synthetic polypeptide representing artificial human antibody VL domain
SYELTQPASVSVSPGQTATITCSGENLGNRYAYWYQHKAGQSPVLVIYQDAQRPSGIPERFSGSNSGNTATLTITGTQAVDEADYYCQAWDSSAVIFGGGTKLTVL

SEQ ID NO: 19392 - protein, 111 aa, Artificial Sequence
  Synthetic polypeptide representing artificial human antibody VL domain
QSALTQPASASESPGQSITISCTGTSSDVGSYNLVSWYQQHPDKAPQLMIYDVSKRPSGVPDRFSGSKSGNTASLTISGLRTEDEADYYCCSYAGSYTLWVFGGGTKLTVL

SEQ ID NO: 19393 - protein, 111 aa, Artificial Sequence
  Synthetic polypeptide representing artificial human antibody VL domain
QLVLTQSPSASASLGASVRLTCTLSSRHFNYAIAWHQLQPGKGPRFLMTVNSDGSHTKGAGIPGRFSGSSSGAERHLTISSLQSEDEAEYFCQTWGTGFQVFGGGTKLAVL

SEQ ID NO: 19394 - protein, 107 aa, Artificial Sequence
  Synthetic polypeptide representing artificial human antibody VL domain
EILVTQSPATLSVSPGERATLSCRASQSVGDNLAWYQQKPGQAPRLLIFGASIRATGVPARFSGSGSGTEFTLTISSLQSEDFAVYFCHHYYFWPGTVGQGTIVEIK

SEQ ID NO: 19395 - protein, 113 aa, Artificial Sequence
  Synthetic polypeptide representing artificial human antibody VL domain
DIVMTQSPDSPAVSLGERATINCKSSQSVLYRSNNKNYLAWYQQKPGQPPKLLIYWASTRESGVPDRFSGSGSGTDFTLTISSLQAEDVAVYFCQQYYSTPYTFGQGTKLEIK

SEQ ID NO: 19396 - protein, 107 aa, Artificial Sequence
  Synthetic polypeptide representing artificial human antibody VL domain
DIQMTQSPSSLSASVGDRVTITCRASQSISSYLNWYQQKPGKAPKLLIYAASSLQSGVPSRFSGSGSGTDFTLTISSLQPEDFATYYCQQSYSTLWTFGQGTKVEIK

SEQ ID NO: 19397 - protein, 107 aa, Artificial Sequence; identical to SEQ ID NO: 19155
  Synthetic polypeptide representing artificial human antibody VL domain

SEQ ID NO: 19398 - protein, 110 aa, Artificial Sequence
  Synthetic polypeptide representing artificial human antibody VL domain
QSVLTQPPSVSGAPGQRVTISCTGNSSNIGAGYDVHWYQQLPGTAPKLLIYGNSNRPSGVPDRFSGSKSGTSASLAITGLQAEDEADYYCQSYDSSLRGVFGGGTKLTVL

SEQ ID NO: 19399 - protein, 108 aa, Artificial Sequence
  Synthetic polypeptide representing artificial human antibody VL domain
EIVLTQSPGTLSLSPGERATLSCRASQFVRGNYLAWFQQKPGQPPRFLIHDASTRATGIPDRFSGSGSGTDFTLTISRLEPEDFAVYYCQYYGTPPRMFGQGTKVEIK

SEQ ID NO: 19400 - protein, 110 aa, Artificial Sequence
  Synthetic polypeptide representing artificial human antibody VL domain
QSVLTQPPSVSAAPGQKVTISCSGGSFNIGNNYVSWYQQFPGTAPRLLIYDTDKRPSGIPDRFSGSKSGTSGTLDITGLQTGDEADYYCGTWDTSLNGVVFGGGTKLTVL

SEQ ID NO: 19401 - protein, 110 aa, Artificial Sequence
  Synthetic polypeptide representing artificial human antibody VL domain
QSALTQPPSASGSPGQSVTISCTGTSSDVGVFDYVSWYQQRPGKAPKLMIYEVVKRPSGVPDRFSGSKSGNTASLTVSGLQTDDEADYYCSSYGGGNTLLFGGGTKLTVL

SEQ ID NO: 19402 - protein, 107 aa, Artificial Sequence
  Synthetic polypeptide representing artificial human antibody VL domain
DIQMTQSPSSLSESVGDRVTITCRASQTISNFLNWYQQKPGKVPKLLIYGASSLQSGVPSRFSGSGSGTEFTLTISSLQPEDSATYYCQQSYDIPFTFGPGTKVDIK

SEQ ID NO: 19403 - protein, 113 aa, Artificial Sequence
  Synthetic polypeptide representing artificial human antibody VL domain
DIVLTQSPDSLAVSLGERATISCKTSQSVFYSPNNKNFLAWYQHKPGQPPKLLISWASTREFGVPDRFSGGGSGTDFTLTISSLQAEDVAVYYCQHYFVLPYSFGQGTMLEIK

SEQ ID NO: 19404 - protein, 113 aa, Artificial Sequence
  Synthetic polypeptide representing artificial human antibody VL domain
DIVMTQSPDSLAVSLGERATINCKSSQSVLYSSNNKNYLAWYQQKPGQPPKLLIYWASTRESGVPDRFSGSGSGTDFTLTIGSLQAEDVAVYFCQQYYSIPRTFGQGTQVDIK

SEQ ID NO: 19405 - protein, 108 aa, Artificial Sequence
  Synthetic polypeptide representing artificial human antibody VL domain
EIVLTQSPGTLSLSPGERATLSCRASQNVGSSSLAWYQQRPGQAPRLLIYGGSTRAAGISDRFTGRGSETDFTLTISRLEPEDFAVYYCQQCGTSSITFGQGTRLEIK

SEQ ID NO: 19406 - protein, 108 aa, Artificial Sequence
  Synthetic polypeptide representing artificial human antibody VL domain
SYVLTQPPPVSVAPGKTARITCGGDNIGNTAVHWYQQKPGQAPVLVIYDDSDRPSGISERFSGSNSGNTATLTISRIEAGDEADYYCQVWDSNTDHWVFGGGTKLTVL

SEQ ID NO: 19407 - protein, 111 aa, Artificial Sequence
  Synthetic polypeptide representing artificial human antibody VL domain
QSVLTQPPSTSGTPGQRVTISCSGRSSNIGSHAVSWYQLLPGAAPKLLIYGLSQRPSGVPDRFSADKSGNSASLAISGLRSEDEADYYCSTWDDSLSGSVVFGGGTRLTVL

SEQ ID NO: 19408 - protein, 110 aa, Artificial Sequence
  Synthetic polypeptide representing artificial human antibody VL domain
QTVVTQEPSFSVSPGETVTLTCALTSGSVSSRHYPSWYQQTPGQPPRTIIYNTNTRSSGIPGRFSGSILGNKAALTITGAQADDDSDYYCVLYMGDGFWVFGGGTKLTVL

SEQ ID NO: 19409 - protein, 107 aa, Artificial Sequence
  Synthetic polypeptide representing artificial human antibody VL domain
DIQMTQSPSAVAASVGDTVTITCRASQDIGKYIAWFQQKPGEVPERLISDVSTWQAAVPPRFSGSGSGTEFSFTISGLQPEDFGTYYCLQHKSFPLTFGGGTKVEIK

SEQ ID NO: 19410 - protein, 106 aa, Artificial Sequence
  Synthetic polypeptide representing artificial human antibody VL domain
SYELTQPPSVSVSPGQTASITCSGDKLGDKYACWYQQKPGQSPVLVIYQDSKRPSGIPERFSGSNSGNTATLTISGTQAMDEADYYCQAWDSSTGVFGGGTKLTVL

SEQ ID NO: 19411 - protein, 107 aa, Artificial Sequence
  Synthetic polypeptide representing artificial human antibody VL domain
SYELIQPPSLSVSPGQTASITCSGDKLEDSYVFWYHQKPGQSPVLLIFQDNQRPSGIPERFSGSNFGNTATLTISGTQAMDEADYYCQAWDTGTHIVFGGGTKLTVL

SEQ ID NO: 19412 - protein, 110 aa, Artificial Sequence
  Synthetic polypeptide representing artificial human antibody VL domain
QSALTQPASVSGSPGQSITISCTGSSSDVGDYKYVSWYQQYPGKAPKLIIDDVTNRPSGVSNRFSGSKSGNTASLTISGVQAEDEGDYYCSSYSSSSTLVFGGGTRLTVL

SEQ ID NO: 19413 - protein, 107 aa, Artificial Sequence
  Synthetic polypeptide representing artificial human antibody VL domain
DIQMTQSPSSLSAVVGDSVTITCRTSQRINRNLNWYQQKPGNAPKVLISATFTLQSGVPPRFSGSGSGTEFTLTINNLQPDDFATYFCQQTDNIPRTFGQGTKVEIK

SEQ ID NO: 19414 - protein, 108 aa, Artificial Sequence
  Synthetic polypeptide representing artificial human antibody VL domain
DIQLTQSPVSLSASVGDRVTITCRASQNIETYLNWYQQKPGKAPELLIYAASRLHTGVPSRFSGGGSGTDFTLTISSLQPADFASYHCQQSFIARAYTFGQGTKVEIK

SEQ ID NO: 19415 - protein, 107 aa, Artificial Sequence
  Synthetic polypeptide representing artificial human antibody VL domain
DIQMTQSPSSVSASIGDRVTITCRASEGLGNWLAWYQQKPGKAPKLLIYGASILQTGVPPRFSGSGSGIEFTLTISGLQAEDIATYFCQQCNDIPLTFGGGTKVEIK

SEQ ID NO: 19416 - protein, 110 aa, Artificial Sequence
  Synthetic polypeptide representing artificial human antibody VL domain
QSALTQPPSASGSPGQSVTISCTGTSSDVGGYNYVSWYQQHPGKAPKLMIYEVSKRPSGVPDRFSGSKSGNTASLTVSGLQAEDEADYYCSSYAGSNNLVFGGGTKLTVL

SEQ ID NO: 19417 - protein, 113 aa, Artificial Sequence
  Synthetic polypeptide representing artificial human antibody VL domain
DIVMTQSPESLAVSLGERATINCKSSQSVLYSPNNKNYLAWYQQKPGQPPKLLIYWASTRESGVPDRFTGSGSGTDFTLTISSLQAEDVAVYYCQQYYAIPWTFGQGTKVEIQ

SEQ ID NO: 19418 - protein, 108 aa, Artificial Sequence
  Synthetic polypeptide representing artificial human antibody VL domain
SYELTQPPSVSVAPGQTARITCGPKDFESQPVHWYQQKTGQAPVLVIYDGGDRPSGIPERFSGSNSEITATLTISRVEAGDEGDYFCQVWNNRRQHVIFGGGTKLTVL

SEQ ID NO: 19419 - protein, 106 aa, Artificial Sequence
  Synthetic polypeptide representing artificial human antibody VL domain
DIQMIQSPSTLSASVGDRVTITCRASQSISSWLAWYQQKPGKAPKLLIYKASTLESGVPSRFSGSGSGTEFTLTISSLQPDDFAIYHCQQYSAYWSFGQGTKVEIK

SEQ ID NO: 19420 - protein, 108 aa, Artificial Sequence
  Synthetic polypeptide representing artificial human antibody VL domain
SYVLTQPPSVSVAPGKTATITCGGNNIGTHSVHWYQQKPGQAPVLVVYDDSDRPSGIPDRFSGSNSGNTATLTISRLEAGDEADYYCQVWDGNSAHVIFGGGTTLTVL

SEQ ID NO: 19421 - protein, 110 aa, Artificial Sequence
  Synthetic polypeptide representing artificial human antibody VL domain
NFLLTQPHSVSESPGRTVTISCTRSSDYIGNFYVHWYQQRPGSAPTTLIYEDSQRASGVPDRFSGSIDRSSNSASLTISDLRAEDEADYFCQSSDSNILIFGGGTKLTVL

SEQ ID NO: 19422 - protein, 108 aa, Artificial Sequence
  Synthetic polypeptide representing artificial human antibody VL domain
EIVMTQSPATLSVSPGERATLSCRASQSVTTNLAWYQQKPGQAPRLLIYGASTRAIGIPVRFSGSGSGTDFTLTIASLQSEDFAVYYCQQYNKWPPYTFGQGTKLDIK

SEQ ID NO: 19423 - protein, 107 aa, Artificial Sequence
  Synthetic polypeptide representing artificial human antibody VL domain
EIVLTQSPATLSLSPGERATLSCRASQSVTTELGWYQQKPGQPPRLLISDVSNRAAGIPDRFSGSGSGTDFTLIISSLEPEDSAVYYCQQRSKWPLTFGGGSKVEIK

SEQ ID NO: 19424 - protein, 110 aa, Artificial Sequence
  Synthetic polypeptide representing artificial human antibody VL domain
QSALTQPPSASGSPGQSVTISCTGTSSDVGGYNYVSWYQHHPGKAPQLIISEVTKRPSGVPDRFSGSKSGNTASLTVSGLQAEDEADYYCASYAGTNIALFGTGTKVTVL

SEQ ID NO: 19425 - protein, 107 aa, Artificial Sequence
  Synthetic polypeptide representing artificial human antibody VL domain
EIVLIQSPDFLSVTPKEKVTITCRASQRVIGSLHWYQQKPHQSPKLLIKFTSQSISGVPSRFSGSGSGTDFTLTINTLEAEDVATYYCHQSGTLPWTFGQGTKVEIK

SEQ ID NO: 19426 - protein, 109 aa, Artificial Sequence
  Synthetic polypeptide representing artificial human antibody VL domain
SYELTQPPSVSVSPGQTARITCSGDALPKKYAYWYQQKSGQAPVLVIYEDSKRPSGIPERFSGSSSGTMATLTISGAQVEDEVDYYCYSTDSSGNHRGVFGGGTKLTVL

SEQ ID NO: 19427 - protein, 111 aa, Artificial Sequence
  Synthetic polypeptide representing artificial human antibody VL domain
QPVLTQSSSASASLGSSVKLACTLSSGHSVYSVAWHQQQSGKAPQFLVKLESTGTYKKGNGISDRFSGSSSGADRYLIISNIQSEDEADYFCETWDSNTRVFGGGTRLSVL

SEQ ID NO: 19428 - protein, 108 aa, Artificial Sequence
  Synthetic polypeptide representing artificial human antibody VL domain
EIVLTQSPGTLSLSPGERATLSCRASQSIASNWLAWYQQRPGQAPRLLIYGASNRAPGIPDRFSGSGSGTDFTLTISRLEPEDFGLYYCHQYDDSEWTFGLGTKVDIK

SEQ ID NO: 19429 - protein, 110 aa, Artificial Sequence
  Synthetic polypeptide representing artificial human antibody VL domain
QSALTQPASVSGSPGQSITISCTGTSSDVGNYDLVSWYQQHPGKVPKVMIYEGDKRPSGVSSRFSGSKSGDTASLTISGLQAEDEAHYYCCLYVPYSLWLFGGGTKLTVL

SEQ ID NO: 19430 - protein, 107 aa, Artificial Sequence
  Synthetic polypeptide representing artificial human antibody VL domain
DIQMTQSPSTLSASVGDKVTITCRASQSISSWLAWYQQKPGKAPKVLIYKASSLESGVPSRFSGSGSGTEFTLTISSLQPDDFATYYCQQYNSYPWTFGQGTKVEIK

SEQ ID NO: 19431 - protein, 107 aa, Artificial Sequence
  Synthetic polypeptide representing artificial human antibody VL domain
EIVLTQSPATLSLSPGERATLSCRASQSVGNYLAWYQQTPGQAPRLLIFGASDRATGIPARFSGSGSGTDFSLTISSLEPEDFAVYYCQQRSDWPLTFGGGTKVEIK

SEQ ID NO: 19432 - protein, 107 aa, Artificial Sequence
  Synthetic polypeptide representing artificial human antibody VL domain
EIVMTQSPATLSVSPGERATLSCRASQSVSRNLAWYQQKPGQAPRLLIFGASTRATGLPARFSGSGSGTEFTLTISSLQSEDFAIYLCQQYYDWPLTFGQGTRLEIK

SEQ ID NO: 19433 - protein, 112 aa, Artificial Sequence
  Synthetic polypeptide representing artificial human antibody VL domain
DIVMTQTPLSLSVTPGQPASISCKSSQSLLNTDGKTYLYWYLQKPGQPPQLLMFEVSNRFSGVPDRFSGSGSVTDFTLKISRVEADDVGIYYCMQTKQVPVTFGGGTKVEIK

SEQ ID NO: 19434 - protein, 107 aa, Artificial Sequence
  Synthetic polypeptide representing artificial human antibody VL domain
DIQMTQSPSSLSASVGDMVTITCRASEDIDDRVAWFQKPIGRAPKSLIHAASSVQSGVPSRFRVRGSGTEFTLTITNLQPEDFATYYCQQFDSYPLTFGGGTKVEIK

SEQ ID NO: 19435 - protein, 108 aa, Artificial Sequence; identical to SEQ ID NO: 19094
  Synthetic polypeptide representing artificial human antibody VL domain

SEQ ID NO: 19436 - protein, 109 aa, Artificial Sequence
  Synthetic polypeptide representing artificial human antibody VL domain
EIVLTQSPATLSLSPGERATLSCRASQSVSSYLAWYQQKPGQAPRLLIYGASNRATGIPGRFSGSGSGTDFTLTISSLEPEDFAVYYCQHRSSWSPVFTFGPGTKVEIK

SEQ ID NO: 19437 - protein, 108 aa, Artificial Sequence
  Synthetic polypeptide representing artificial human antibody VL domain
EIMMTQSPATLSVSPGERATLSCRASQSVSSNLAWYQQKPGQAPRLLIYGASTRATGIPARFSGSGSGTEFTLTISSLQSEDFAVYFCQQYNNWPPITFGQGTRLEIK

SEQ ID NO: 19438 - protein, 108 aa, Artificial Sequence
  Synthetic polypeptide representing artificial human antibody VL domain
SYVVTQPPAVSVAPGQTARISCGGNNIASKSVHWYLQTPGQAPVLVVYEDSARASGIPERFSGSNSGNTATLTISRVEAGDEADYFCQVWDSSIDHPLFGGGTKLTVL

SEQ ID NO: 19439 - protein, 108 aa, Artificial Sequence
  Synthetic polypeptide representing artificial human antibody VL domain
EIVMTQSPATLSVSPGERATLSCRASHSVDNYLAWYQQKPGQAPRLLIYGASTRATGIPARFSGSGSETEFTLTITSLQSEDFAVYYCQQYKEWPPRTFGPGTKVEIK

SEQ ID NO: 19440 - protein, 108 aa, Artificial Sequence
  Synthetic polypeptide representing artificial human antibody VL domain
EIVLTQSPGTLSLSPGERATLSCRASQFVRGNYLAWFQQKPGQPPRFLIYGASSRATGIPYRFSGSGSGTDFTLTISRLEPEDSAVYYCQYYGTPPRMFGQGTKVEIK

SEQ ID NO: 19441 - protein, 107 aa, Artificial Sequence
  Synthetic polypeptide representing artificial human antibody VL domain
DIQMTQSPTSLSASVGDRVTITCRASENIFELLNWYQQKPGRAPKLLIYGASGLQSGVPSRFSGSGSGTDFTLTISSLHRDDFATYYCQQAYSSRWTFGQGTSVEIK

SEQ ID NO: 19442 - protein, 110 aa, Artificial Sequence
  Synthetic polypeptide representing artificial human antibody VL domain
QSVLTQPLSASGTPGQRVTISCSGGRSNIAINAVHWYRQFPGEAPTVLIYNTDQRPSGVPDRVSGSKSGASASLVISGLQSEDEADYFCTGWDDGLGGPVFGGGTKLTVL

SEQ ID NO: 19443 - protein, 108 aa, Artificial Sequence
  Synthetic polypeptide representing artificial human antibody VL domain
EIVLTQSPGTLSLSPGERATLSCRTSQNISSRYLAWYRQKPGQAPKLLILSTSFRAAGIPDRFSGSGSGTDFTLTISRLEPEDFAVFYCQKYGSSMWTFGQGTKVEIK

SEQ ID NO: 19444 - protein, 107 aa, Artificial Sequence
  Synthetic polypeptide representing artificial human antibody VL domain
DIQLTQSPSFLSASVGDRVTITCRASQGISSYLAWYQQKPGKAPKLLIYAASTLQSGVPSRFSGSGSGTEFTLTISSLQPEDFATYYCQQLNSYPPTFGQGTKVEIK

SEQ ID NO: 19445 - protein, 108 aa, Artificial Sequence
  Synthetic polypeptide representing artificial human antibody VL domain
EIVMSQSPDTLSLSAGERATLSCRASHSVYGNYLAWFQKKPGRAPRFLMYEVSKRAPGTPDRFSGSGSGTDFTLTISRLEPEDSAVYYCQNYGTEPRMFGQGTRVEIK

SEQ ID NO: 19446 - protein, 109 aa, Artificial Sequence
  Synthetic polypeptide representing artificial human antibody VL domain
QSALTQPPSASGSPGQSVTISCTGTSNDVGRSNFVSWYRQHPGRAPKLIIDELHNRPSGVPDRFSDSKSGNTAYLTVSGLQAEDEADYYCSSYTGNKILFGGGTKLTVL

SEQ ID NO: 19447 - protein, 105 aa, Artificial Sequence
  Synthetic polypeptide representing artificial human antibody VL domain
SYELTQPPSVSVSPGQTAHIPCSGDKLENKHVSWYQQKPGQSPVLIIYQDDKRPSGIPERFSGSNSGNTATLTISGAQAMDEAHFYCQAWDSTVVFGGGTKVTVL

SEQ ID NO: 19448 - protein, 108 aa, Artificial Sequence
  Synthetic polypeptide representing artificial human antibody VL domain
SYVLTQPPSVSVAPGKTATITCGGNNIGTHSVHWYQQKPGQAPVLVVYDDSDRPSGIPERFSGSNSGNTATLTISGLEAGDEADYYCQVWDGDSAHVIFGGGTTLTVL

SEQ ID NO: 19449 - protein, 108 aa, Artificial Sequence
  Synthetic polypeptide representing artificial human antibody VL domain
SYELTQPPSVSVSPGQTARITCSGDALPKQYAYWYQQKPGQAPVLVIYKDSERPSGIPERFSGSSSGTTVTLTISGVQAEDEADYYCQSADSSGTYVLFGGGTKLTVL

SEQ ID NO: 19450 - protein, 113 aa, Artificial Sequence
  Synthetic polypeptide representing artificial human antibody VL domain
DIVVTQSPASLAVSLGERATINCKSSQSVLYSSNNNNYLNWYQQRPGQPPKLLIYWASTRESGVPDRFSGSGSGTDFTLTISSLQAEDVAVYYCQQCYSFPYAFGQGTKLEIK

SEQ ID NO: 19451 - protein, 108 aa, Artificial Sequence
  Synthetic polypeptide representing artificial human antibody VL domain
EIVLTQSPATLSLSPGDRATLSCRASQTVPSNYLAWYRQKPGQPPRLLTYGASQRAVGIPDRFSGSGSGTDFTLTITRLEPDDFAIYYCRKYGTLPSTFGPGTRVEIK

SEQ ID NO: 19452 - protein, 110 aa, Artificial Sequence
  Synthetic polypeptide representing artificial human antibody VL domain
QSVLIQPPSASGTPGQGVTISCSGSTSSIGSNTVLWFRHLPGTAPKLLIYNSNQRPSGVPDRFSGSKSGTSASLAISGLQSEDDTDYYCAAWDDSLNGWLFGGGTKLTVL

SEQ ID NO: 19453 - protein, 108 aa, Artificial Sequence
  Synthetic polypeptide representing artificial human antibody VL domain
DIQLTQSPSSLSASVGDRVTITCRASQGISSYLAWYQQKPGKAPKLLIYAASTLQSGVPSRFSGSGSGTDFTLTISSLQPEDFATYYCQQLNSYPPITFGQGTRLEIK

SEQ ID NO: 19454 - protein, 107 aa, Artificial Sequence
  Synthetic polypeptide representing artificial human antibody VL domain
EIVLTQSPATLSLSAGERATLSCRASQSVTNYLDWYQHKPGQAPRLLIYGAFNRASGIPARFSGSGSGTDFTLTVSSLETEDFAVYYCQQRSYWPRTFGQGTKLEIK

SEQ ID NO: 19455 - protein, 112 aa, Artificial Sequence
  Synthetic polypeptide representing artificial human antibody VL domain
QSVLTQPPSVSGAPGQGVTISCTGSTSNIGSGYGVHWYQHLPGTAPKLIIYADSRRPSGVPDRFSGSKSGTSASLAITGLQAEDAGDYYCQTYDNRLSASVVFGGGTKVTVL

SEQ ID NO: 19456 - protein, 110 aa, Artificial Sequence
  Synthetic polypeptide representing artificial human antibody VL domain
QSALTQPRSVSGSPGQSVTISCTGTSSDVGGYNYVSWYQQHPGKAPKLMIYDVSKRPSGVPDRFSGSKSGNTASLTISGLQAEDEADYYCCSYAGSYLWVFGGGTKLTVL

SEQ ID NO: 19457 - protein, 112 aa, Artificial Sequence
  Synthetic polypeptide representing artificial human antibody VL domain
DIVMTQSPDSLAVSLGERATINCKSSQSVLYSSNNKNYLAWYQQKPGQPPKLLIYWASTRESGVPDRFSGSGSGTDFTLTISSLQAEDVAVYYCQQYYSLRTFGQGTKVEIK

SEQ ID NO: 19458 - protein, 103 aa, Artificial Sequence
  Synthetic polypeptide representing artificial human antibody VL domain
EIVMTQSPATLSVSPGERATLSCRASQSVSSNLAWYQQKPGQAPRLLIYGASTRATGIPARFSGSGSGTEFTLTISSLQSEDFAVYYCQFRGTFGQGTKVEIK

SEQ ID NO: 19459 - protein, 108 aa, Artificial Sequence
  Synthetic polypeptide representing artificial human antibody VL domain
EIVMTQSPATLSVSPGERATLSCRASQSVSSNLAWYQQKPGQAPRLLIYGASTRATGIPARFSGSGSGTEFTLTISSLQSEDFAVYYCQQYNNWPPLTFGGGTKVEIK

SEQ ID NO: 19460 - protein, 108 aa, Artificial Sequence
  Synthetic polypeptide representing artificial human antibody VL domain
DIQLTQSPSFLSASVGDRVTITCRASQGISSYLAWYQQKPGKAPKLLIYAASTLQSGVPSRFSGSGSGTEFTLTISSLQPEDFATYYCQQLNSYPPLTFGGGTKVEIK

SEQ ID NO: 19461 - protein, 107 aa, Artificial Sequence
  Synthetic polypeptide representing artificial human antibody VL domain
DIQMTQSPSSLSASVGDRVTITCRASQGISNYLAWYQQKPGKVPKLLIYAASTLQSGVPSRFSGSGSGTDFTLTISSLQPEDVATYYCQKYNSAPLTFGGGTKVEIK

SEQ ID NO: 19462 - protein, 107 aa, Artificial Sequence
  Synthetic polypeptide representing artificial human antibody VL domain
DIQLTQSPSFLSASVGDRVTITCRASQGISTYLAWYQQEPGKAPKLLIYSASTLQSGVPSRFSGSGSGTEFTLTITNLQPEDFATYYCQELNSYPRTFGQGTRLEIK

SEQ ID NO: 19463 - protein, 107 aa, Artificial Sequence
  Synthetic polypeptide representing artificial human antibody VL domain
DIQMTQSPSSLSASVGDRVTITCRASQGISNYLAWYQQKPGKVPKLLIYAASTLQSGVPSRFSGSGSGTDFTLTISSLQPEDVATYYCQKYNSALGTFGQGTKVEIK

SEQ ID NO: 19464 - protein, 110 aa, Artificial Sequence
  Synthetic polypeptide representing artificial human antibody VL domain
QSALTQPRSVSGSPGQSVTISCTGTSSDVGGYNYVSWYQQHPGKAPKLMIYDVSKRPSGVPDRFSGSKSGNTASLTISGLQAEDEADYYCCSYAGSYSYVFGTGTKVTVL

SEQ ID NO: 19465 - protein, 108 aa, Artificial Sequence
  Synthetic polypeptide representing artificial human antibody VL domain
QSALTQPRSVSGSPGQSVTISCTGTSSGFRGYNFVSWYLHHPGKAPKLIIYDVNKRPSGVPDRFSGSRSGNTASLTISGLQAEDEADYYCCSYTGTYYFGGGTKLTVL

SEQ ID NO: 19466 - protein, 108 aa, Artificial Sequence; identical to SEQ ID NO: 18838
  Synthetic polypeptide representing artificial human antibody VL domain

SEQ ID NO: 19467 - protein, 107 aa, Artificial Sequence
  Synthetic polypeptide representing artificial human antibody VL domain
DIQMTQSPSSLSASVGDRVTITCRASQGIRNDLGWYQQKPGKAPKRLIYAASSLQSGVPSRFSGSGSGTEFTLTISSLQPEDFATYYCLQHNSYPLTFGQGTRLEIK

SEQ ID NO: 19468 - protein, 108 aa, Artificial Sequence
  Synthetic polypeptide representing artificial human antibody VL domain
SYVLTQPPSVSVDPGKTATISCEGNNIGSKVVHWYQQRPGQAPVLLIYYNTDRPSGIPERFSGSNSGNTATLTLSRVEAGDEADYYCQLWDSSGDQVVFGGGTQLTVL

SEQ ID NO: 19469 - protein, 108 aa, Artificial Sequence
  Synthetic polypeptide representing artificial human antibody VL domain
EIVLTQSPGTLSLSPGERATLSCRASQSVSSSYLAWYQQKPGQAPRLLIYGASSRATGIPDRFSGSGSGTDFTLTISRLEPEDFAVYYCQQYGSSFGTFGQGTKLEIK

SEQ ID NO: 19470 - protein, 110 aa, Artificial Sequence; identical to SEQ ID NO: 19060
  Synthetic polypeptide representing artificial human antibody VL domain

SEQ ID NO: 19471 - protein, 113 aa, Artificial Sequence
  Synthetic polypeptide representing artificial human antibody VL domain
DIVMTQSPDSLAVSLGERATINCKTSLSVFYEFNNLNYLAWYQQKPAEPPKLLIYWASTRASGVPDRFSGSGSGTDFTLTISSLQAEDVALYFCQQYLTAHPSFGQGTRVELK

SEQ ID NO: 19472 - protein, 107 aa, Artificial Sequence
  Synthetic polypeptide representing artificial human antibody VL domain
DIQMTQSPSSLSASVGDRVTITCRASQSISSYLNWYQQKPGKAPKLLIYAASSLQSGVPSRFSGSGSGTDFTLTISSLQPEDFATYYCQQSYSTSYTFGQGTKLEIK

SEQ ID NO: 19473 - protein, 107 aa, Artificial Sequence
  Synthetic polypeptide representing artificial human antibody VL domain
DIQMTQSPSSLSASAGDRVSITCRASQGISNYVAWYQQKPGKAPKLLIYAASTLHSGVPSRFSGSRSGTDFTLTISSLQPEDVATYFCQKYNSAPYTFGQGTKLEIK

SEQ ID NO: 19474 - protein, 107 aa, Artificial Sequence
  Synthetic polypeptide representing artificial human antibody VL domain
EIVMTQSPATLSVSPGERATLSCRASQSVSRNLAWYRQRPGQAPSLLIYAASTRATGVPARFSGSGSGTEFTLTISSLQSEDFAVYYCNQYNNWPLTFGGGTKVQIK

SEQ ID NO: 19475 - protein, 108 aa, Artificial Sequence
  Synthetic polypeptide representing artificial human antibody VL domain
DIQLTQSPSFLSASVGDRVTITCRASQGISSYLAWYQQKPGKAPKLLIYAASTLQSGVPSRFSGSGSGTEFTLTISSLQPEDFATYYCQQLNSYPPYTFGQGTKLEIK

SEQ ID NO: 19476 - protein, 107 aa, Artificial Sequence
  Synthetic polypeptide representing artificial human antibody VL domain
DIQLTQSPSILSASAGDRVTITCRASQGISHYLAWYQQQPGRAPKLLIYGASTLQSGVPSRFSGSGSGTEFTLTINSLQPEDFATYYCQYLSDSPRTFGQGTRLEIK

SEQ ID NO: 19477 - protein, 108 aa, Artificial Sequence
  Synthetic polypeptide representing artificial human antibody VL domain
EIVLTQSPGTLSLSPGERATLSCRASQSVSSSYLAWYQQKPGQAPRLLIYGASSRATGIPDRFSGSGSGTDFTLTISRLEPEDFAVYYCQQYGSSPGTFGQGTKVEIK

SEQ ID NO: 19478 - protein, 112 aa, Artificial Sequence
  Synthetic polypeptide representing artificial human antibody VL domain
DIVMTQTPLSLSVTPGQPASISCKSSQSLLHSDGKTYLYWYLQKPGQSPQLLIYEVSNRFSGVPDRFSGSGSGTDFTLKISRVEAEDVGVYYCMQSIQLPLTFGGGTKVEIK

SEQ ID NO: 19479 - protein, 108 aa, Artificial Sequence
  Synthetic polypeptide representing artificial human antibody VL domain
SYELTQPPSVSVSPGQTARITCSGDALPKQYAYWYQQKPGQAPVLVIYKDSERPSGIPERFSGSSSGTTVTLTISGVQAEDEADYYCQSADSSGTSLVFGGGTKLTVL

SEQ ID NO: 19480 - protein, 105 aa, Artificial Sequence
  Synthetic polypeptide representing artificial human antibody VL domain
SYELTQPPSVSVSPGQTASITCSGDKLGDKYACWYQQKPGQSPVLVIYQDSKRPSGIPERFSGSNSGNTATLTISGTQAMDEADYYCQAWDSSTVFGGGTKLTVL

SEQ ID NO: 19481 - protein, 107 aa, Artificial Sequence
  Synthetic polypeptide representing artificial human antibody VL domain
DIQMTQSPSSLSASVGDRVTITCRASQSISSYLNWYQQKPGKAPKLLIYAASSLQSGVPSRFSGSGSGTDFTLTISSLQPEDFATYYCQQSYSTPKTFGQGTKVEIK

SEQ ID NO: 19482 - protein, 109 aa, Artificial Sequence
  Synthetic polypeptide representing artificial human antibody VL domain
SSELTQDPAVSVALGQTVRITCRGDSLRNYYASWYQKKPGQAPVLVIYGKNNRPSGIPDRFSGSGSGNTASLIISVAQAEDEADYYCNSRDNSGNHPRIFGGGTKLTVL

SEQ ID NO: 19483 - protein, 110 aa, Artificial Sequence; identical to SEQ ID NO: 19044
  Synthetic polypeptide representing artificial human antibody VL domain

SEQ ID NO: 19484 - protein, 107 aa, Artificial Sequence; identical to SEQ ID NO: 18857
  Synthetic polypeptide representing artificial human antibody VL domain

SEQ ID NO: 19485 - protein, 113 aa, Artificial Sequence
  Synthetic polypeptide representing artificial human antibody VL domain
DIVMTQSPDSLAVSLGERATITCRSSQNLLYGYNNKNYLAWFQHKPGQPPRLLIYWASTRESGVPERFSGSGSGTDFTLTISSLQAEDVAVYYCQQYYTNPFTFGPGTKVYVK

SEQ ID NO: 19486 - protein, 117 aa, Artificial Sequence
  Synthetic polypeptide representing artificial human antibody VL domain
QPVLTQPPSASASLGASVTLTCTLSSGYSNYKVDWYQQRPGKGPRFVMRVGTGGIVGSKGDGIPDRFSVLGSGLNRYLTIKNIQEEDESDYHCGADHGSGSNFVYVVFGGGTKLTVL

SEQ ID NO: 19487 - protein, 109 aa, Artificial Sequence
  Synthetic polypeptide representing artificial human antibody VL domain
SYELTQPPSVSVSPGQTARITCSGDALPNKYVYWYQQKSGQAPILVIYEDNKRTSGTPRRFSGSSSGTLATLTISGAQVEDEGDYYCYSTDSKGYHQGIFAGGTKLTVL

SEQ ID NO: 19488 - protein, 108 aa, Artificial Sequence
  Synthetic polypeptide representing artificial human antibody VL domain
SYELTQPPSVSVSPGQTARITCSGDALPKQYAYWYQQKPGQAPVLVIYKDSERPSGIPERFSGSSSGTTVTLTISGVQAEDEADYYCQSADSSGTSVVFGGGTKLTVL

SEQ ID NO: 19489 - protein, 106 aa, Artificial Sequence; identical to SEQ ID NO: 18811
  Synthetic polypeptide representing artificial human antibody VL domain

SEQ ID NO: 19490 - protein, 109 aa, Artificial Sequence
  Synthetic polypeptide representing artificial human antibody VL domain
QSALTQPRSVSGSPGQSVTISCTGTSSDVGGYNYVSWYQQHPGKAPKLMIYDVSKRPSGVPDRFSGSKSGNTASLTISGLQAEDEADYYCCSYAGSLVVFGGGTKLTVL

SEQ ID NO: 19491 - protein, 110 aa, Artificial Sequence
  Synthetic polypeptide representing artificial human antibody VL domain
QSALTQPASVSGSPGQSITISCTGTSSDVGTYDLVSWYQQHPGKAPKLMIYEVTERPSGVSNRFSGSKSGNTASLTISGLQAEDEADYYCSSYAGNRKGVFGGGTKLTVL

SEQ ID NO: 19492 - protein, 112 aa, Artificial Sequence
  Synthetic polypeptide representing artificial human antibody VL domain
QSVLTQPPSVSGAPGQRVTISCTGSSSNIGAGYDVHWYQQLPGTAPKLLIYGNSNRPSGVPDRFSGSKSGTSASLAITGLQAEDEADYYCQSYDSSLSGLYVFGTGTKVTVL

SEQ ID NO: 19493 - protein, 107 aa, Artificial Sequence
  Synthetic polypeptide representing artificial human antibody VL domain
EIVMTQSPDTLSVSPGERATLSCRASQTLSGHLAWYQHKPGQAPRLLISGASIRATGVPARFSGSESGTEFTLTISSLQSEDFALYYCQQYDKWPLTFGGGTKVEIK

SEQ ID NO: 19494 - protein, 108 aa, Artificial Sequence
  Synthetic polypeptide representing artificial human antibody VL domain
DIQMTQSPSSLSASVGDRVTITCRASQSISSYLNWYQQKPGKAPKLLIYAASSLQSGVPSRFSGSGSGTDFTLTISSLQPEDFATYYCQQSYSTPPYTFGQGTKLEIK

SEQ ID NO: 19495 - protein, 107 aa, Artificial Sequence
  Synthetic polypeptide representing artificial human antibody VL domain
SYELTQPPSVSVSPGQTASITCSGDKLGDKYACWYQQKPGQSPVLVIYQDSKRPSGIPERFSGSNSGNTATLTISGTQAMDEADYYCQAWDSSTFVVFGGGTKLTVL

SEQ ID NO: 19496 - protein, 110 aa, Artificial Sequence
  Synthetic polypeptide representing artificial human antibody VL domain
QSVLTQPPSASGTPGQRVTISCSGSSSNIGSNYVYWYQQLPGTAPKLLIYRNNQRPSGVPDRFSGSKSGTSASLAISGLRSEDEADYYCAAWDDSLSAWVFGGGTKLTVL

SEQ ID NO: 19497 - protein, 114 aa, Artificial Sequence
  Synthetic polypeptide representing artificial human antibody VL domain
DIVLTQTPLSLSVTPGQPASISCKSTQSLLHSDGKTYFYWYVQKPGQPPQLLIYEVSRRFSGVPDRFSGSGSGTDFTLQISRVEAEDVGVYYCMQSIQLPLIYTFGQGTKLEIK

SEQ ID NO: 19498 - protein, 106 aa, Artificial Sequence
  Synthetic polypeptide representing artificial human antibody VL domain
DIQMTQSPSTLSASVGDRVTITCRASQSIDTWLAWYQQKPGQAPKLLIYKASSLEYGVPSRFSGSGSGTEFTLTISSLQPDDFASYYCQQYKSNYNFGQGTKLEIK

SEQ ID NO: 19499 - protein, 106 aa, Artificial Sequence
  Synthetic polypeptide representing artificial human antibody VL domain
SYELTQPPSVSVSPGQTASITCSGDKLGDKYACWYQQKPGQSPVLVIYQDSKRPSGIPERFSGSNSGNTATLTISGTQAMDEADYYCQAWDSSTGVFGTGTKVTVL

SEQ ID NO: 19500 - protein, 116 aa, Artificial Sequence
  Synthetic polypeptide representing artificial human antibody VL domain
QPVLTQPPSASASLGASVTLTCTLSSGYSNYKVDWYQQRPGKGPRFVMRVGTGGIVGSKGDGIPDRFSVLGSGLNRYLTIKNIQEEDESDYHCGADHGSGSNFVYVFGTGTKVTVL

SEQ ID NO: 19501 - protein, 112 aa, Artificial Sequence
  Synthetic polypeptide representing artificial human antibody VL domain
QSVLTQPPSVSGAPGQRVTISCTGSSSNIGAGYDVHWYQQLPGTAPKLLIYGNSNRPSGVPDRFSGSKSGTSASLAITGLQAEDEADYYCQSYDSSLSGSGVFGGGTKLTVL

SEQ ID NO: 19502 - protein, 107 aa, Artificial Sequence
  Synthetic polypeptide representing artificial human antibody VL domain
DIQMTQSPSTLSASVGDRVTITCRASQSISNLLAWYQQKPGKAPKLLIYKASSLERGVPSRFSGSGSGTEFTLTISSLQPDDFATYYCQQYNSYSRTFGQGTKVEIK

SEQ ID NO: 19503 - protein, 107 aa, Artificial Sequence
  Synthetic polypeptide representing artificial human antibody VL domain
EIVLTQSPATLSLSPGERATLSCRASHSVSTSLGWYQQRPGQAPRLLIYDASNRATGIPTRFSGSGSGTDFTLTISSLEPEDFAVYYCQQRSKWPLTFGGGTKVEIK

SEQ ID NO: 19504 - protein, 107 aa, Artificial Sequence
  Synthetic polypeptide representing artificial human antibody VL domain
DIQLTQSPSFLSASVGDRVTITCRASQDTSIYLAWYQQKSGKAPKLLIYDASTLQSGVPSRFSGSGSGTEFTLTISSLQPEDFATYYCQQLNSYPLTFGGGTKVEIK

SEQ ID NO: 19505 - protein, 109 aa, Artificial Sequence
  Synthetic polypeptide representing artificial human antibody VL domain
EIVMTQSPATLSVSPGERATLSCRASQSVSSNLAWYQQKPGQAPRLLIYGASTRATGIPARFSGSGSGTEFTLTISSLQSEDFAVYYCQQYNNWPPIWTFGQGTKVEIK

SEQ ID NO: 19506 - protein, 107 aa, Artificial Sequence
  Synthetic polypeptide representing artificial human antibody VL domain
EIVLTQSPATLSLSPGERATLSCRASQSVSSYLAWYQQKPGQAPRLLIYDASNRATGIPARFSGSGSGTDFTLTISSLEPEDFAVYYCQQRSNWPITFGQGTRLEIK

SEQ ID NO: 19507 - protein, 107 aa, Artificial Sequence
  Synthetic polypeptide representing artificial human antibody VL domain
DIQMTQSPSSLSASVGDRVTITCRASQGISSWLAWYQQKPEKAPKSLIYAASSLQSGVPSRFSGSGSGTDFTLTISSLQPEDFATYYCQQYNSYPVTFGQGTRLEIK

SEQ ID NO: 19508 - protein, 106 aa, Artificial Sequence; identical to SEQ ID NO: 18811
  Synthetic polypeptide representing artificial human antibody VL domain

SEQ ID NO: 19509 - protein, 106 aa, Artificial Sequence
  Synthetic polypeptide representing artificial human antibody VL domain
SYELTQPPSVSVSPGQTARITCSGDALPKQYAYWYQQKPGQAPVLVIYKDSERPSGIPERFSGSSSGTTVTLTISGVQAEDEADYYCQSADSSGIVFGGGTKLTVL

SEQ ID NO: 19510 - protein, 107 aa, Artificial Sequence; identical to SEQ ID NO: 19291
  Synthetic polypeptide representing artificial human antibody VL domain

SEQ ID NO: 19511 - protein, 103 aa, Artificial Sequence
  Synthetic polypeptide representing artificial human antibody VL domain
DIQLTQSPSFLSASVGDRVTITCRASQGISSYLAWYQQKPGKAPKLLIYAASTLQSGVPSRFSGSGSGTEFTLTISSLQPEDFATYYCQQLNTFGQGTRLEIK

SEQ ID NO: 19512 - protein, 111 aa, Artificial Sequence
  Synthetic polypeptide representing artificial human antibody VL domain
QSALTQPASVSGSPGQSITISCTGTSSDVGSYNLVSWYQQHPGKAPKLMIYEVSKRPSGVSNRFSGSKSGNTASLTISGLQAEDEADYYCCSYAGSSTFVVFGGGTKLTVL

SEQ ID NO: 19513 - protein, 111 aa, Artificial Sequence
  Synthetic polypeptide representing artificial human antibody VL domain
QSALTQPPSASGSPGQSVAISCTGTNSDVGGYDSVSWYQQHPGKAPKLIISEVNRRPSGVPDRFSGSKSGNTASLTVSGLQAEDEADYFCSSFAGIPKHYVFGTGTKVTVL

SEQ ID NO: 19514 - protein, 107 aa, Artificial Sequence; identical to SEQ ID NO: 19149
  Synthetic polypeptide representing artificial human antibody VL domain

SEQ ID NO: 19515 - protein, 112 aa, Artificial Sequence
  Synthetic polypeptide representing artificial human antibody VL domain
QSALTQPASVSGSPGQSITISCTGTSSDVGSYNLVSWYQQHPGKAPKLMIYEVSKRPSGVSNRFSGSKSGNTASLTISGLQAEDEADYYCCSYAGSSTSYVVFGGGTKLTVL

SEQ ID NO: 19516 - protein, 111 aa, Artificial Sequence; identical to SEQ ID NO: 19202
  Synthetic polypeptide representing artificial human antibody VL domain

SEQ ID NO: 19517 - protein, 109 aa, Artificial Sequence
  Synthetic polypeptide representing artificial human antibody VL domain
SYELTQPPSVSVSPGQTARITCSGDALPKQYSYWYQRKPGQAPVLVMFKDSERPSGIPERFSGSSSGTTVTLTISGVQAEDEADYYCQSADNIGSFLVVFGGGTKLTVL

SEQ ID NO: 19518 - protein, 108 aa, Artificial Sequence; identical to SEQ ID NO: 18908
  Synthetic polypeptide representing artificial human antibody VL domain

SEQ ID NO: 19519 - protein, 108 aa, Artificial Sequence
  Synthetic polypeptide representing artificial human antibody VL domain
DIQMTQSPSSLSASVGDRVTITCRASQSISSYLNWYQQKPGKAPKLLIYAASSLQSGVPSRFSGSGSGTDFTLTISSLQPEDFATYYCQQSYSTPLYTFGQGTKLEIK

SEQ ID NO: 19520 - protein, 116 aa, Artificial Sequence
  Synthetic polypeptide representing artificial human antibody VL domain
QPVLTQPPSASASLGASVTLTCTLSSGYSNYKVDWYQQRPGKGPRFVMRVGTGGIVGSKGDGIPDRFSVLGSGLNRYLTIKNIQEEDESDYHCGADHGSGSNFAVVFGGGTKLTVL

SEQ ID NO: 19521 - protein, 108 aa, Artificial Sequence
  Synthetic polypeptide representing artificial human antibody VL domain
EIVLTQSPGTLSLSPGERVTLSCRASQSVYRNFLSWYQQKPGQAPRLLIYDASTRATGIPTKFTGSGSGTDFSLTISRLEPEDSAVYYCQQYGRSPPTFGGGTKVGIK

SEQ ID NO: 19522 - protein, 112 aa, Artificial Sequence; identical to SEQ ID NO: 18863
  Synthetic polypeptide representing artificial human antibody VL domain

SEQ ID NO: 19523 - protein, 111 aa, Artificial Sequence
  Synthetic polypeptide representing artificial human antibody VL domain
QAVVTQEPSLTVSPGGTVTLTCGSSTGVVTNGHFPYWFQQKPGQAPRTLIFDTSYKHSWTPDRFSGSLLGGKAALTLSGALSEDEAEYYCLLYHSAFVVIGFGGGTKLTVL

SEQ ID NO: 19524 - protein, 108 aa, Artificial Sequence
  Synthetic polypeptide representing artificial human antibody VL domain
SYELTQPPSVSVSPGQTARITCSGDALSKKYAYWYQQKSGQAPVLVIYEDTKRPSGIPERFSGSGSGTMATLTISGAQVEDEADYYCYSRDTSGNLRVFGGGTKVTVL

SEQ ID NO: 19525 - protein, 113 aa, Artificial Sequence
  Synthetic polypeptide representing artificial human antibody VL domain
DIVMTQSPDSLAVSLGERATINCKSSQSVLYSSNNKNYLAWYQQKPGQPPKLLIYWASTRESGVPDRFSGSGSGTDFTLTISSLQAEDVAVYYCQQYYSTPPTFGQGTKVEIK

SEQ ID NO: 19526 - protein, 111 aa, Artificial Sequence
  Synthetic polypeptide representing artificial human antibody VL domain
QSALTQPPSASGSPGQSVTISCTGTSSDVGGYNSVSWYQQHPGKAPKLMISEVSKRPSGVPDRFSGSKSGNTASLTVSGLQAEDEADYYCSSFAGTDYHYVFGTGTKVTVL

SEQ ID NO: 19527 - protein, 107 aa, Artificial Sequence
  Synthetic polypeptide representing artificial human antibody VL domain
DIQMTQSPSSLSASVGDRVTITCRASQAISYSLVWYQQKAGNVPKLLLYSASRLESGVPSRFSGSGSGAEYTLTISNLQPEDFATYYCQQYYSTTVTFGGGTKVEIK

SEQ ID NO: 19528 - protein, 107 aa, Artificial Sequence
  Synthetic polypeptide representing artificial human antibody VL domain
AIRMTQSPSSFSASTGDRVTITCRASQGISSYLAWYQQKPGKAPKLLIYAASTLQSGVPSRFSGSGSGTDFTLTISCLQSEDFATYYCQQYYSYPWTFGQGTKVEIK

SEQ ID NO: 19529 - protein, 108 aa, Artificial Sequence
  Synthetic polypeptide representing artificial human antibody VL domain
QSALTQPASVSGSPGQSITISCTGTSSDVGGYNYVSWYQQHPGKAPKLMIYDVSKRPSGVSNRFSGSKSGNTASLTISGLQAEDEADYYCCSYAGSWVFGGGTKLTVL

SEQ ID NO: 19530 - protein, 106 aa, Artificial Sequence
  Synthetic polypeptide representing artificial human antibody VL domain
SYELTQPPSVSVSPGQTARITCSGDALPKQYAYWYQQKPGQAPVLVIYKDSERPSGIPERFSGSSSGTTVTLTISGVQAEDEADYYCQSADSSGYVFGTGTKVTVL

SEQ ID NO: 19531 - protein, 110 aa, Artificial Sequence
  Synthetic polypeptide representing artificial human antibody VL domain
QSVLTQPPSASGTPGQRVIISCSGSSSNIGSNTVNWYQHLTGTAPQLLIYNNNQRPSGVPDRFSGSKSGTSASLAISGLQSEDEADYYCAAWDDRLLGPLFGGGTKVTVL

SEQ ID NO: 19532 - protein, 112 aa, Artificial Sequence
  Synthetic polypeptide representing artificial human antibody VL domain
QSVLTQPPSVSGAPGQTVAISCTANSSNIVAAYGVHWYQQLPGAAPKLLIYSNTKRPSGVPDRFSGSRSDASASLTITGLQAEDEADYYCQSYDGSLSGSGVFGTGTRVAVL

SEQ ID NO: 19533 - protein, 109 aa, Artificial Sequence
  Synthetic polypeptide representing artificial human antibody VL domain
SYELTQPPSVSVPPGQTARITCSGDTLPKQYTYWYQRKSGQAPVLVIYKDSERPSGIPERFSGSSSGTTVTLTISGVQAEDEADYYCQSADSSGTFLVVFGGGTKLTVL

SEQ ID NO: 19534 - protein, 108 aa, Artificial Sequence; identical to SEQ ID NO: 18783
  Synthetic polypeptide representing artificial human antibody VL domain

SEQ ID NO: 19535 - protein, 107 aa, Artificial Sequence
  Synthetic polypeptide representing artificial human antibody VL domain
DIRLTQSPSSLSASVGDRVTITCRASQNVITSLNWYQQTPGKAPKVLIYSGSTLRNGVPSRFSGSGSGTEFTLTITSLQPEDFATYYCHQTHSTPRTFGPGTKVEIK

SEQ ID NO: 19536 - protein, 107 aa, Artificial Sequence; identical to SEQ ID NO: 18788
  Synthetic polypeptide representing artificial human antibody VL domain

SEQ ID NO: 19537 - protein, 113 aa, Artificial Sequence
  Synthetic polypeptide representing artificial human antibody VL domain
DVVMTQSPLSLSVTLGQSASISCTSSQSLLYNAGNTYLSWFHQRPGQSPRRLIYRVSDRDSGVPNRFSGSGSGTDFTLKISSVEAEDVGVYYCMQGTDWPVYTFGQGTKLEIK

SEQ ID NO: 19538 - protein, 111 aa, Artificial Sequence
  Synthetic polypeptide representing artificial human antibody VL domain
QSVLTQPPSASGTPGQRVTISCSGSSSNIGSNYVYWYQQLPGTAPKLLIYRNNQRPSGVPDRFSGSKSGTSASLAISGLRSEDEADYYCAAWDDSLSGSYVFGTGTKVTVL

SEQ ID NO: 19539 - protein, 111 aa, Artificial Sequence
  Synthetic polypeptide representing artificial human antibody VL domain
NFMLTQPHSVSESPGKTVTISCTGSSGSIASNYVQWYQQRPGSAPTTVIYEDNQRPSGVPDRFSGSIDSSSNSASLTISGLKTEDEADYYCQSYDSSNHVVFGGGTKLTVL

SEQ ID NO: 19540 - protein, 107 aa, Artificial Sequence
  Synthetic polypeptide representing artificial human antibody VL domain
DIQLTQSPSSLSAHVGDSVTITCRASQSISVYLNWYHQRPGKAPKLLIHAASSLHSGVPSRFSGSASGADFTLTISSLRPEDFGSYFCQQTYNSPWTFGQGTTVEIK

SEQ ID NO: 19541 - protein, 110 aa, Artificial Sequence
  Synthetic polypeptide representing artificial human antibody VL domain
QSVLTQPPSVSAAPGQKVTISCSGSSSNIGNNYVSWYQQLPGTAPKLLIYDNNKRPSGIPDRFSGSKSGTSATLGITGLQTGDEADYYCGTWDSSLSAVVFGTGTKVTVL

SEQ ID NO: 19542 - protein, 106 aa, Artificial Sequence
  Synthetic polypeptide representing artificial human antibody VL domain
SYELTQPPSVSVSPGQTASITCSGDKLGDKYACWYQQKPGQSPVLVIYQDSKRPSGIPERFSGSNSGNTATLTISGTQAMDEADYYCQAWDSSTAVFGGGTKLTVL

SEQ ID NO: 19543 - protein, 109 aa, Artificial Sequence
  Synthetic polypeptide representing artificial human antibody VL domain
QSVLTQPPSASGTPGQRVTISCSGSSSNIGSNYVYWYQQLPGTAPKLLIYRNNQRPSGVPDRFSGSKSGTSASLAISGLRSEDEADYYCAAWDDSLSVLFGGGTKLTVL

SEQ ID NO: 19544 - protein, 110 aa, Artificial Sequence
  Synthetic polypeptide representing artificial human antibody VL domain
QSVLTQPPSASGTPGQRVTISCSGSSSNIGSNTVNWYQQLPGTAPKLLIYSNNQRPSRVPDRFSGSKSGTSASLAISGLQSEDEADYYCAAWDDSLNGWVFGGGTKLTVL

SEQ ID NO: 19545 - protein, 113 aa, Artificial Sequence
  Synthetic polypeptide representing artificial human antibody VL domain
DIVMTQSPDSLAVSLGETATINCKSTQSLFNRSNNKNCVTWLQQKPGQPPKLLIYWASTREIGVPERFSGSGAGSDFTLSITNLQAEDVAVYYCQQFLSPPYTFGQGTKLEIK

SEQ ID NO: 19546 - protein, 116 aa, Artificial Sequence; identical to SEQ ID NO: 19500
  Synthetic polypeptide representing artificial human antibody VL domain

SEQ ID NO: 19547 - protein, 110 aa, Artificial Sequence; identical to SEQ ID NO: 19267
  Synthetic polypeptide representing artificial human antibody VL domain

SEQ ID NO: 19548 - protein, 109 aa, Artificial Sequence
  Synthetic polypeptide representing artificial human antibody VL domain
SYELTQPPSVSVSPGQTARITCSGDTLPKQFSYWYQQKPGQAPVLVMYKDSERPSGIPERFSGSSSGTTVTLTISGVQAEDEADYYCQSAESSGSYLVVFGGGTKLTVL

SEQ ID NO: 19549 - protein, 107 aa, Artificial Sequence
  Synthetic polypeptide representing artificial human antibody VL domain
DIQMTQSPSSLSASVGDRVTITCRASQSIGHYVNWYQQKPGEAPNLLIFAATSLQSGVPPRFSGSGSGTHFNLTISGLQAADFATYSCQQSYSPPWTFGQGTKVEIK

SEQ ID NO: 19550 - protein, 110 aa, Artificial Sequence; identical to SEQ ID NO: 19200
  Synthetic polypeptide representing artificial human antibody VL domain

SEQ ID NO: 19551 - protein, 107 aa, Artificial Sequence
  Synthetic polypeptide representing artificial human antibody VL domain
DIQMTQSPSSLSASVGDRVTITCRASQSISSYLNWYQQKPGKAPKLLIYAASSLQSGVPSRFSGSGSGTDFTLTISSLQPEDFATYYCQQSYSTPFTFGPGTKVDIK

SEQ ID NO: 19552 - protein, 108 aa, Artificial Sequence; identical to SEQ ID NO: 18812
  Synthetic polypeptide representing artificial human antibody VL domain

SEQ ID NO: 19553 - protein, 109 aa, Artificial Sequence
  Synthetic polypeptide representing artificial human antibody VL domain
SYDLTQPPSVSVSPGQTARITCSGDALPKQYTYWYQRKPGQAPVLVIYRDSERPSGIPERFSGSSSGTTVTLTISGVQAEDEAEYYCQSADNIGTFLVLFGGGTKLTVL

SEQ ID NO: 19554 - protein, 112 aa, Artificial Sequence
  Synthetic polypeptide representing artificial human antibody VL domain
QSVLTQPPSVSGAPGQRITISCTGSSSNIGAGYDVHWYQQLPGTAPKLLISGNNDRPSGVPDRFSGSKSGTSASLAITGLQAEDEADYYCQSYDSSLIGSVIFGGGTKLTVL

SEQ ID NO: 19555 - protein, 108 aa, Artificial Sequence; identical to SEQ ID NO: 18838
  Synthetic polypeptide representing artificial human antibody VL domain

SEQ ID NO: 19556 - protein, 113 aa, Artificial Sequence
  Synthetic polypeptide representing artificial human antibody VL domain
DIVMTQSPDSLAVSLGERATLNCTSSRTLLYTSNNKNYLAWYQQKPRQPPKLLIYWSSTRESGVPARFSGGGSGTDFTLTISNLQAEDVAVYYCQQYYNTPYSFGQGTKLEIK

SEQ ID NO: 19557 - protein, 108 aa, Artificial Sequence
  Synthetic polypeptide representing artificial human antibody VL domain
SSELTQDPAVSVAWGQTVRITCQGDSLRNYYPNWYQQKPGQAPLLVMFGGDKRPSGIPDRFSGSASGMTASLTITGAQVEDEADYYCHSRAKSGYHYVFGGGTKVTVL

SEQ ID NO: 19558 - protein, 110 aa, Artificial Sequence; identical to SEQ ID NO: 18934
  Synthetic polypeptide representing artificial human antibody VL domain

SEQ ID NO: 19559 - protein, 105 aa, Artificial Sequence; identical to SEQ ID NO: 19480
  Synthetic polypeptide representing artificial human antibody VL domain

SEQ ID NO: 19560 - protein, 109 aa, Artificial Sequence
  Synthetic polypeptide representing artificial human antibody VL domain
SYELTQPPSVSVSPGQTARITCSGDALPKQYTYWYQRKPGQAPVLVMYKDSERPSGIPERFSGSSSGTTVTLTISGVQAEDEADYYCQSADNIGTFLVVFGGGTKLTVL

SEQ ID NO: 19561 - protein, 109 aa, Artificial Sequence
  Synthetic polypeptide representing artificial human antibody VL domain
EIVMTQSPATLSVSPGERVTLSCRASQGIGSNLAWYQQKPGQAPRLLIYGASTRATGIPATFSGSGSGTDFTLTISSLQSEDFAVYYCQQYTKWPPGLTFGGGTKVEIK

SEQ ID NO: 19562 - protein, 106 aa, Artificial Sequence
  Synthetic polypeptide representing artificial human antibody VL domain
SYELTQPPSVSVSPGQTASITCSGDKLGDKYACWYQQKPGQSPVLVIYQDSKRPSGIPERFSGSNSGNTATLTISGTQAMDEADYYCQAWDSSLYVFGTGTKVTVL

SEQ ID NO: 19563 - protein, 106 aa, Artificial Sequence; identical to SEQ ID NO: 19542
  Synthetic polypeptide representing artificial human antibody VL domain

SEQ ID NO: 19564 - protein, 108 aa, Artificial Sequence
  Synthetic polypeptide representing artificial human antibody VL domain
EIVLTQSPGTLSLSPGERATLSCRASQSVSSSYLAWYQQKPGQAPRLLIYGASSRATGIPDRFSGSGSGTDFTLTISRLEPEDFAVYYCQQYGSSLVTFGQGTKVEIK

SEQ ID NO: 19565 - protein, 108 aa, Artificial Sequence; identical to SEQ ID NO: 18838
  Synthetic polypeptide representing artificial human antibody VL domain

SEQ ID NO: 19566 - protein, 113 aa, Artificial Sequence
  Synthetic polypeptide representing artificial human antibody VL domain
DIVMTQSPDSLAVSLGERATVNCRSSRTILYSSNNKNYLAWYQQKPGQPPKLLIYWASTRESGVPARFSGSGSGTDFTLTISSLQAEDVAVYYCQQYYNTPYTFGQGTKLEIK

SEQ ID NO: 19567 - protein, 111 aa, Artificial Sequence
  Synthetic polypeptide representing artificial human antibody VL domain
DIVMTQTPLSLSVTPGQPASISCKSSQSLLHSDGKTYLYWYLQKPGQSPQLLIAEVSSRFSGVPDRFSGSGSGTDFTLKISRVEAEDVGVYYCMQGIHLWTFGQGTKVELK

SEQ ID NO: 19568 - protein, 109 aa, Artificial Sequence
  Synthetic polypeptide representing artificial human antibody VL domain
EIVMTQSPATLSVSPGEGATLSCRASESVSSSLAWYQQRPGQPPRLLIYGASTRATGVPPRFSGSGSETDFTLTISGLQAEDFGVYFCQLYAEWPPKHTFGQGTKLESK

SEQ ID NO: 19569 - protein, 108 aa, Artificial Sequence; identical to SEQ ID NO: 19479
  Synthetic polypeptide representing artificial human antibody VL domain

SEQ ID NO: 19570 - protein, 109 aa, Artificial Sequence
  Synthetic polypeptide representing artificial human antibody VL domain
SYELTQPPSVSVSPGQTARITCSGDALPKQYAYWYQQKPGQAPVLVIYKDSERPSGIPERFSGSSSGTTVTLTISGVQAEDEADYYCQSADSSGTSDVVFGGGTKLTVL

SEQ ID NO: 19571 - protein, 110 aa, Artificial Sequence
  Synthetic polypeptide representing artificial human antibody VL domain
QSALTQPPSASGSPGQSVTISCTGTGSDFGDYNYVSWYQQHPGKAPKLILYEVTKRPSGVPDRFSGSKFDNTASLTVSGLQAEDEADYYCSSSIGNYNYVFGTGTKVTVL

SEQ ID NO: 19572 - protein, 107 aa, Artificial Sequence
  Synthetic polypeptide representing artificial human antibody VL domain
SYVLTQPPSVSVAPGKTARITCGGNNIGSKSVHWYQQKPGQAPVLVVYDDSDRPSGIPERFSGSNSGNTATLTISRVEAGDEADYYCQVWDSSSPVVFGGGTKLTVL

SEQ ID NO: 19573 - protein, 112 aa, Artificial Sequence
  Synthetic polypeptide representing artificial human antibody VL domain
DIVMTQTPLSLPVTLGQPASISCRSSQSLVHRDGNTYLSWVQQRPGQPPRLLIYKISKRFSGVPDRFSGSGAVTDFTLRINRVQAEDVGVYYCMQVTDFPWTFGQGTKVEIK

SEQ ID NO: 19574 - protein, 115 aa, Artificial Sequence
  Synthetic polypeptide representing artificial human antibody VL domain
QAVVTQPSSLSASLGASTSLTCTLRSGINVASHRIYWYQQKPGSPPRFLLRYTSDSDKSQGSGVPSRFSGSKDASANSGTLLISGLRSEDEAYYYCMIWHNMALVFGGGTNLTVL

SEQ ID NO: 19575 - protein, 110 aa, Artificial Sequence
  Synthetic polypeptide representing artificial human antibody VL domain
QAGLAQPPSMSRDLGQTATLTCTGNSDNVGNQGAAWLQQHQGHPPKLLSYKNNNRPSGVSERFSASRSGNTASLTISRLQPEDEADYFCSAWDSSLTARVFGAGTHLTVL

SEQ ID NO: 19576 - protein, 108 aa, Artificial Sequence
  Synthetic polypeptide representing artificial human antibody VL domain
EIVLTQSPGTLSLSPGERATLSCRASQSVSSSYLAWYQQKPGQAPRLLIYGASSRTTGIPDRFSGSGSGTDFTLTITRLEPEDFALYYCQQYGDSQLTFGGGTKVEIK

SEQ ID NO: 19577 - protein, 107 aa, Artificial Sequence
  Synthetic polypeptide representing artificial human antibody VL domain
DIQMTQSPSFVSASVGDRVSITCRASPGIGKWLAWHQQKPGKAPKLLIYAASALHNGVPSRFSGSGSGTEFTLTISGLQPEDVATYYCQQADSFPVTFGQGTRVEIK

SEQ ID NO: 19578 - protein, 110 aa, Artificial Sequence
  Synthetic polypeptide representing artificial human antibody VL domain
QSVLTQPPSVSAAPGQKVTISCSASSSKIGNNYVSWYRQVPGTAPKLLIYDNNQRPSGIPDRFSGSKSGTSATLAITGLQTGDEADYYCGTWDTSLSAWVFGGGTKLAVL

SEQ ID NO: 19579 - protein, 108 aa, Artificial Sequence
  Synthetic polypeptide representing artificial human antibody VL domain
SSELTQDPAVSVALGQTVRITCQGDSLRSFYANWYQQKPGQAPVLVFYSFNNRPSGIPDRFSGSSSGNTASLTITGAQAEDEADYYCHSRDSSGHLSLFGTGTKVTVL

SEQ ID NO: 19580 - protein, 107 aa, Artificial Sequence
  Synthetic polypeptide representing artificial human antibody VL domain
EIGMTQFPATLSVSPGERATLSCRASQDLTSSLAWYQQKPGQAPRLLIYGVSIRATGIPGRFSGSGSGTDYTLTISSLQSDDSAVYYCQHYHKWPITFGQGTRLDIK

SEQ ID NO: 19581 - protein, 112 aa, Artificial Sequence
  Synthetic polypeptide representing artificial human antibody VL domain
QAVLTQPSSLSVSPGASARLTCTLRSGIDVGTYWMHWYQQKTGSPPHYVLRYKDDYQDSGVSSRFSGSKDTSANAGILVISGIQPDDEADYYCMIWDNNAAVFGGGTKLTVL

SEQ ID NO: 19582 - protein, 112 aa, Artificial Sequence
  Synthetic polypeptide representing artificial human antibody VL domain
DIVMTQTPLSSPVTLGQPASISCRSSKSLVHADGNTYLSWLHQRPGQPPRLLLYKISNRLSGVPDRFSGSGAGADFTLKISRVEPEDVGIYYCMQATHFPLSFGGGTKVEIK

SEQ ID NO: 19583 - protein, 111 aa, Artificial Sequence
  Synthetic polypeptide representing artificial human antibody VL domain
QSVLTQPPSVSAAPGQKVTISCSGSSSNIGNNYVSWYQQLPGAAPKLLIYDNNKRPSGIPDRFSGSKSGTSATLGITGLQTGDEADYYCGTWDSSLSAGGLFGGGTKLTVL

SEQ ID NO: 19584 - protein, 110 aa, Artificial Sequence
  Synthetic polypeptide representing artificial human antibody VL domain
QSALTQPPSASGSLGQSVTISCTGTSSDIGGYDFVSWYQHHPDKAPKLMILQVTKRPSGVPDRFSGSKSGNTASLTVSGLQADDEADYYCSSYAGSNNWVFGGGTKLTVL

SEQ ID NO: 19585 - protein, 110 aa, Artificial Sequence
  Synthetic polypeptide representing artificial human antibody VL domain
EIVMTQSPVTLSVSPGERATLSCRASQSVSSNLAWYQQKPGQAPRLLIYGASTRATGIPARFSGSGSGTEFTLTISSLQSEDFAVYYCQQYNNWPPARITFGQGTRLEIK

SEQ ID NO: 19586 - protein, 110 aa, Artificial Sequence
  Synthetic polypeptide representing artificial human antibody VL domain
QTVVTQEPSFSVSPGGTVTLTCGLTSGSVSDNYWPSWYQQTPGQAPRSLIYNTNIRFSGVPDRFSGSILGNKAALTITGAQPDDESDYYCVLYRGRGAVVFGGGTRLTVL

SEQ ID NO: 19587 - protein, 110 aa, Artificial Sequence
  Synthetic polypeptide representing artificial human antibody VL domain
QSVLTQPPSASGTPGQRVTISCSGSSSNIGSNYVYWYQQLPGTAPKLLIYSNNQRPSGVPDRFSGSKSGTSASLAISGLRSEDEADYYCAAWDDSLNGYVFGTGTKVTVL

SEQ ID NO: 19588 - protein, 108 aa, Artificial Sequence
  Synthetic polypeptide representing artificial human antibody VL domain
EIVLTQSPATLSLSPGERATLSCRASQTVGNSFLAWYQKRPGQNHRLLIYGTSNRASGIPDRFSGSGSGTDFFLTISRLEAEDFAVYFCQQRAKWPPTFGQGTKVEIK

SEQ ID NO: 19589 - protein, 107 aa, Artificial Sequence
  Synthetic polypeptide representing artificial human antibody VL domain
DIQLTQSPSFLSASVGDRVTITCRASQGISSYLAWYQQKPGKAPKLLIYAASTLQSGVPSRFSGSGSGTEFTLTISSLQPEDFATYYCQQLNSYPFTFGGGTKVEIK

SEQ ID NO: 19590 - protein, 107 aa, Artificial Sequence
  Synthetic polypeptide representing artificial human antibody VL domain
SYVLTQPPSVSVAPGTTARITCGGNKFGIYTVHWYQQKPGQAPVLVIYSDSDRPSGIPERFSGSNSGNTATLTISRVEAGDEADYFCQVWDSGNERVFGGGTKLTVL

SEQ ID NO: 19591 - protein, 107 aa, Artificial Sequence
  Synthetic polypeptide representing artificial human antibody VL domain
EILLTQSPATLSASPGERASLSCRASQSVGSQLAWYRQRPGQAPRLLIYGSFIRAIGIPARFSGSGSGTEFTLTISSLQSEDFAVYYCQHYIEWPITFGQGTRLEIK

SEQ ID NO: 19592 - protein, 108 aa, Artificial Sequence
  Synthetic polypeptide representing artificial human antibody VL domain
EIVMTQSPATLSVSPGERATLSCRASQSVSTHLAWYQQKPGQAPRLLIYGASTRATDIPARFSGSGSGTEFTLTISSLQSEDFAVYYCQQYKNWPTWTFGQGTKVEIK

SEQ ID NO: 19593 - protein, 107 aa, Artificial Sequence
  Synthetic polypeptide representing artificial human antibody VL domain
EIVLTQSPATLTLSPGERATLSCRASQSVSNYLVWYQQKPAQAPRLLIYGASNRATGIPGRFSGSGSGTDFTLTISSLEPEDFAFYFCQQRSKWPITFGQGTRLEIK

SEQ ID NO: 19594 - protein, 107 aa, Artificial Sequence
  Synthetic polypeptide representing artificial human antibody VL domain
DIQMTQSPSSLSASVGDRVTITCRASQSISSYLNWYQQKPGKAPKLLIYAASSLQSGVPSRFSGSGSGTDFTLTISSLQPEDFATYYCQQSYSTPHTFGQGTKLEIK

SEQ ID NO: 19595 - protein, 106 aa, Artificial Sequence
  Synthetic polypeptide representing artificial human antibody VL domain
DIHMTQSPSSLSASVGDRVTITCRASQSIDSWLAWYQQRPGKAPKLLIYKASYLESGVPSRFSGSGSGTEFTLTITSLQPDDFATYYCQQYYSYRGFGQGTKVEMK

SEQ ID NO: 19596 - protein, 110 aa, Artificial Sequence
  Synthetic polypeptide representing artificial human antibody VL domain
QAGLTQPPSVSKGLRQTATLTCTGNSNNVGYQGAAWLQQRQGHPPKLLSYRSNNRPSGISERLSASRSGNTASLTITGLQPEDEADYYCSAWDSSLSAQVFGGGTKLTVL

SEQ ID NO: 19597 - protein, 107 aa, Artificial Sequence
  Synthetic polypeptide representing artificial human antibody VL domain
DIQMTQSPSSLSASVGDRVTITCRASQGISNYLAWYQQKPGKVPKLLISGASTLQSGVPSRFRGSGSGTHFTLTISSLQPEDIGNYYCQKYNSVPLTFGGGTKVEIK

SEQ ID NO: 19598 - protein, 109 aa, Artificial Sequence
  Synthetic polypeptide representing artificial human antibody VL domain
QSALTQPASVSGSPGQSITISCTGTSSDVGDYNYVSWYQRHPGKAPKLMIYDVSKRPSGVSNRFSGSKSGYTASLTISGLQAEDEADYYCSSYTSSSTVFGGGTKLTVL

SEQ ID NO: 19599 - protein, 107 aa, Artificial Sequence
  Synthetic polypeptide representing artificial human antibody VL domain
DIQLTQSPSSLSASVGDKVTITCQASQGIAKSLNWYHQRPGKAPNLLIYDASNLEVGVPSRFSGSGSGTDFTFTITSLHSEDIGTYFCQQNDNVPITFGQGTRLDLK

SEQ ID NO: 19600 - protein, 111 aa, Artificial Sequence
  Synthetic polypeptide representing artificial human antibody VL domain
QSVLTQPPSVSAAPGQKVTISCSGSSSNIGNNYVSWYQHLPGTAPKLLIYDNNKRPSGIPDRFSGSKSGTSATLGITGLQPGDEADYYCGTWDSGLSGGALFGGGTKLTVL

SEQ ID NO: 19601 - protein, 107 aa, Artificial Sequence
  Synthetic polypeptide representing artificial human antibody VL domain
EIVMTQSPGTLSVSPAERVTLSCGASQSVGSALAWYQQKPGQAPRLLLYGASIWATGVPARFSGSGSGTYFTLTIRGLQSEDVAVYYCQQYFKWPITFGQGTRLEIK

SEQ ID NO: 19602 - protein, 110 aa, Artificial Sequence
  Synthetic polypeptide representing artificial human antibody VL domain
QSALTQPASVSGSPGQSITISCTGTSSDVGNYNRVSWFQQYPGKVPKLMIYEDTKRPSGISNRFSGSKSGNTASLTISGLQAEDEADYYCCSYARGEKWVFGGGTKLTVL

SEQ ID NO: 19603 - protein, 110 aa, Artificial Sequence
  Synthetic polypeptide representing artificial human antibody VL domain
SSELTQDPAVSVALRQTVRITCQGDSLRTFYASWYQQKPGQAPVVVMYGKNNRPSGIPDRFSGSNSGDTSSLIITETQAEDEADYYCCSRDSSGNHLRVIFGGGTKLTVL

SEQ ID NO: 19604 - protein, 107 aa, Artificial Sequence
  Synthetic polypeptide representing artificial human antibody VL domain
EIVLTQSPATLSLSPGERASLSCRASQSVGNYLAWYQQKPGQAPRLLIYDASNRATGVPVRFSGGGSGTDFTLTISSLDPEDFAVYYCQQRTNWPLTFGGGTKVEIK

SEQ ID NO: 19605 - protein, 110 aa, Artificial Sequence
  Synthetic polypeptide representing artificial human antibody VL domain
QSALTQPASVSGSPGQSITISCTGTSSDVGGYNFVSWYQQYPGKAPKLMIYDVSNRPSGVSNRFSGSKSGNVASLTISGLQAEDEADYYCASYTTRLFVVFGGGTKLTVL

SEQ ID NO: 19606 - protein, 108 aa, Artificial Sequence
  Synthetic polypeptide representing artificial human antibody VL domain
EIVMTQSPATLSVSPGERATLSCRASQSVDTNLAWYQQKPGQAPRLLIYGSSTRAPGIPARFSGRGSGTEFTLTISSLQFEDFGLYYCQQYKNWPPRTFGQGTKVEIK

SEQ ID NO: 19607 - protein, 109 aa, Artificial Sequence
  Synthetic polypeptide representing artificial human antibody VL domain
QSALTQPASVSGSPGQSITISCTGTSSDVGGSTFISWYQQHPGKAPKVILYDVFKRPSGVSSRFSGSKSGNTASLTISGLQAEDEADYYCCSYISTNTLFGGGTKLTVL

SEQ ID NO: 19608 - protein, 109 aa, Artificial Sequence
  Synthetic polypeptide representing artificial human antibody VL domain
SSELTQDPAVSVALGQTVRITCRGDILRSYYVSWYQQKPGQAPVLVIFGNNNRPSGIPDRFSGSSSGNTGSLTITGAQAEDEADYYCNSRDTSGDHLWMFGGGTKLTVL

SEQ ID NO: 19609 - protein, 107 aa, Artificial Sequence
  Synthetic polypeptide representing artificial human antibody VL domain
SYELTQPPSVSVSPGQTAKITCSGDALPNLSVYWYQQRPGQAPVLVIFKDTERPSGIPERFSGSSSGTTVTLTISGVQAEDTADFYCQSADNNGFVAFGGGTKLTVL

SEQ ID NO: 19610 - protein, 109 aa, Artificial Sequence
  Synthetic polypeptide representing artificial human antibody VL domain
EIVLTQSPGTLSLSPGERATLSCRASQSVNSNYLAWYQQKVGQAPRLLIYGASTRATGIPDRISGSGSGTDFTLTISRLEPEDFAVYFCQHYGSSPPYSFGQGTKLEIQ

SEQ ID NO: 19611 - protein, 113 aa, Artificial Sequence
  Synthetic polypeptide representing artificial human antibody VL domain
DIVMSQSPDSLAVSLGERATISCKSSRSVLSRSNNQNYLAWYQQKPGQSPKLLIYWASTRESGVPDRFSGSGSGTDFTLTISSLQAEDVAVYYCQHYYDTPLSFGGGTKVEIK

SEQ ID NO: 19612 - protein, 107 aa, Artificial Sequence
  Synthetic polypeptide representing artificial human antibody VL domain
DIQMTQSPSSLSASVGDRVTITCRASQSISSYLNWYQQKPGKAPKLLIYAASSLQSGVPSRFSGSGSGTDFTLTISSLQPEDFATYYCQQSYSTAITFGQGTRLEIK

SEQ ID NO: 19613 - protein, 110 aa, Artificial Sequence
  Synthetic polypeptide representing artificial human antibody VL domain
QSALTQPASVSGSPGQSITMSCTGTSSDVGGYNYISWYQQYPGRAPKLIISDVGNRPSGVSNRFSGSKSGNTASLTISGLQAQDEADYYCMSYTTSNSYVFGSGTNVIVL

SEQ ID NO: 19614 - protein, 107 aa, Artificial Sequence
  Synthetic polypeptide representing artificial human antibody VL domain
DIQMTQSPSSLSASVGDRVTITCRASQGFGNRLGWYQQRPGTAPKRLIYATSSLQSGVPSRFSGSGSGTEFTLTISSLQPEDFATYYCLDYNSYPLTFGGGTKVEIK

SEQ ID NO: 19615 - protein, 112 aa, Artificial Sequence
  Synthetic polypeptide representing artificial human antibody VL domain
DIVMTQSPLSLPVTPGEPASISCRSNQSLLHSNGHNYLDWYVQKPGQSPQLLTYLGSSRASGVSDRFSGSGSGTDFTLKISRVEADDVGVYYCMQALRSPITFGQGTRLDIK

SEQ ID NO: 19616 - protein, 109 aa, Artificial Sequence
  Synthetic polypeptide representing artificial human antibody VL domain
QSLLTQPPSVSGAPGQTVTISCTGSTANLGIGYGVQWYKQVPGTAPKVLIHSNTNRASGISERFSGSKSGTSASLTISGLQPDDEGDYYCQSHDAASVVFGGGTKLAVL

SEQ ID NO: 19617 - protein, 112 aa, Artificial Sequence
  Synthetic polypeptide representing artificial human antibody VL domain
DIVMTQSPLSLPVTPGEPASISCRSSQSLLYSNGYNYVDWFLQKPGQSPQLLIYMASSRASGVPDRFSGSGSGTDFTLKISRVEAEDVGVYYCMQPLHTPWTFGQGTKVEIK

SEQ ID NO: 19618 - protein, 107 aa, Artificial Sequence
  Synthetic polypeptide representing artificial human antibody VL domain
EIVMTQSPATLSVFPGERATLSCRARQSVSSKLAWYQQKPGQAPRLLIYGTSTRATGVPARFSGSGSGTEFTLTINSLQSEDFALYFCQHYNNWPPAFGQGTKVEIK

SEQ ID NO: 19619 - protein, 111 aa, Artificial Sequence
  Synthetic polypeptide representing artificial human antibody VL domain
QSALTQPASVSGSPGQSITISCTGTSSDVGGYNYVSWYQQHPGKAPKLMIYDVSKRPSGVSNRFSGSKSGNTASLTISGLQAEDEADYYCSSYTSSSTLWVFGGGTKLTVL

SEQ ID NO: 19620 - protein, 110 aa, Artificial Sequence
  Synthetic polypeptide representing artificial human antibody VL domain
QSVLTQPPSASGTPGQRVTISCSGSSSNIGSNTVNWYQQLPGTAPKLLIYSTNQRPSGVPDRFSGSKSGTSASLAISGLQSEDEADYYCAAWDDTLIGYVFATGTKVTVL

SEQ ID NO: 19621 - protein, 110 aa, Artificial Sequence
  Synthetic polypeptide representing artificial human antibody VL domain
NFMLTQPHSVSESPGKTITVSCTRSSGSIGNNFVQWYQQRPGSTPAVLIYDHAKRPSGVPDRFSGSIDTSSNSASLTISGLKTEDEADYYCQSYDRGKMVLGGGTKLTVL

SEQ ID NO: 19622 - protein, 108 aa, Artificial Sequence
  Synthetic polypeptide representing artificial human antibody VL domain
EIVMTQSPATLSVSPGERATLSCTASQSVNTNLAWYQQKPGQAPRLLIYGSSTRATGIPARFSGRGSGTQFTLTISSLQLEDFGTYYCQQYMNWPPRTFGQGTKVEIK

SEQ ID NO: 19623 - protein, 110 aa, Artificial Sequence
  Synthetic polypeptide representing artificial human antibody VL domain
QSALTQPPSASGSPGQSVTISCTGTSSDVGAYDYVSWYQQYPGKAPKLMIFETTKRPSGVPNRFSGSKSANTASLTVSGLQSEDEADYYCCSYAGNNRFVFGTGTKVSVL

SEQ ID NO: 19624 - protein, 111 aa, Artificial Sequence
  Synthetic polypeptide representing artificial human antibody VL domain
QSALTQPPSVSGSPGQSVTISCTGTSSDIGGYDRVSWYQQPPGTAPKLMIYEVSNRPSGVPDRFSGSKSGNTASLTISGLQAEDEAHYYCCSYTDSSPSVVFGGGTKVTVL

SEQ ID NO: 19625 - protein, 108 aa, Artificial Sequence
  Synthetic polypeptide representing artificial human antibody VL domain
DIQMTQSPSSLSASVGDSVSITCQASRDISNDLNWYQQKPGKAPQLLIYDASNLQAGVPSRFSGSGSGTEFTLTISSLQPEDIGTYYCQLYDNVVPVTFGPGTKVDIK

SEQ ID NO: 19626 - protein, 107 aa, Artificial Sequence
  Synthetic polypeptide representing artificial human antibody VL domain
DIQMTQSPSSLSASVGDRVTITCRASQGITNFLAWYQQKPGKVPKLLIYAASTLQSGVPSRFSGRGSGTDFTLTISSLQPEDVATYYCQKYNSAPLTFGQGTKVEIK

SEQ ID NO: 19627 - protein, 107 aa, Artificial Sequence
  Synthetic polypeptide representing artificial human antibody VL domain
DIQMTQSPSTLSASVGDRVTITCRASQSISSWLAWYQQKPGKAPKLLIYKASSLESGVPSRFSGSGSGTEFTLTISSLQPDDFATYYCQQYNSYSGSFGQGTKLEIK

SEQ ID NO: 19628 - protein, 110 aa, Artificial Sequence
  Synthetic polypeptide representing artificial human antibody VL domain
QSSLTQPASVSGSPGQSITISCTGTSSDVGAYNLVSWYQQHPGKAPKLMIYEVNKRPSGVSNRFSGSKSGNTASLTISGLQAEDEADYYCCSYVGDFYVIFGGGTTLTVL

SEQ ID NO: 19629 - protein, 107 aa, Artificial Sequence
  Synthetic polypeptide representing artificial human antibody VL domain
DIQVTQSPSSLSAFVGDRVTITCRTSQNINYFLNWYQQKPGKAPRLLIYTASTLQSGVPSRFSGSGSGTDFTLTITSLQPEDFVSYYCQQSYTTPITFGGGTKVEIK

SEQ ID NO: 19630 - protein, 109 aa, Artificial Sequence
  Synthetic polypeptide representing artificial human antibody VL domain
QTVVTQEPSLTVSPGGTVTLTCASSTGAVTSGYYPSWFQRKPGQAPRALIYSTINKQSWTPARFSGSLLGDKAALTLSGVQPEDEAEYYCQLYYGGALVFGGGTKLTVL

SEQ ID NO: 19631 - protein, 107 aa, Artificial Sequence
  Synthetic polypeptide representing artificial human antibody VL domain
DIQLTQSPSFLSASVGDRVTITCRASQGISSYLAWYQQKPGKAPKLLIYAASTLQSGVPSRFSGSGSGTEFTLTISSLQPEDFATYYCQQLNSYSLTFGGGTKVEIK

SEQ ID NO: 19632 - protein, 108 aa, Artificial Sequence
  Synthetic polypeptide representing artificial human antibody VL domain
SSELTQDPAVSVALGQTVRITCQGDNLRSYYANWYQQRPGQAPVLVIHGNNNRPSGIPDRFSGSTSGNTATLTITGAQAGDEADYYCSCRDGNGNHVPFGGGTKLTVL

SEQ ID NO: 19633 - protein, 108 aa, Artificial Sequence; identical to SEQ ID NO: 19193
  Synthetic polypeptide representing artificial human antibody VL domain

SEQ ID NO: 19634 - protein, 108 aa, Artificial Sequence
  Synthetic polypeptide representing artificial human antibody VL domain
EIVLTQFPVTLSVSPGERVALSCRASQSINTNLAWYQQRPGQPPRLLMYGSSTRATGVPARFSGRGSGTEFTLTISSLQSEDFALYFCQQYSNWPPRTFGQGTRVEMK

SEQ ID NO: 19635 - protein, 107 aa, Artificial Sequence
  Synthetic polypeptide representing artificial human antibody VL domain
DIQMTQFPSSLSASVGDRVTITCRASQRISTYLNWYQQRPGKAPKLLIYAASTLQSGVPSGFSGSGSGTDFTLTISSLQPEDFATYFCQQSYSSPYNFGQGTKLESK

SEQ ID NO: 19636 - protein, 110 aa, Artificial Sequence
  Synthetic polypeptide representing artificial human antibody VL domain
QSELTQPPSASGTPGQRVTISCSGSSSNIGSDAVNWYQHLPGTAPKLLIYNNNLRPSRVPDRFSGSKSGTSASLAISGLRSEDEALYYCAAWDDSLNGVLFGGGTRLTVL

SEQ ID NO: 19637 - protein, 109 aa, Artificial Sequence
  Synthetic polypeptide representing artificial human antibody VL domain
SYVLTQPPSVSVAPGKTARITCGGDNIGGKGVLWYQQRPGQAPVLVVYDDSARPSGIPERFSASKSGSTATLTISRVEAEDEADYFCQVWDTNTDHLEVFGGGTKLTVL

SEQ ID NO: 19638 - protein, 107 aa, Artificial Sequence
  Synthetic polypeptide representing artificial human antibody VL domain
DIQMTQSPSSLSASVGDTVTITCRASQVISGYLAWYQQRPGKSPKLLIYAASTLQSGVPSRFSGSGSGTDYSLTISSLQPEDVGAYYCQKYNSAPWTFGQGTTVEIK

SEQ ID NO: 19639 - protein, 110 aa, Artificial Sequence
  Synthetic polypeptide representing artificial human antibody VL domain
QSVLTQPPSASATPGQSVTISCSGSTSNIGPNNVYWYQQFPGRAPKLLKDTYNEGPSGVPDRFSGSKSGTSASLAISGVRPEDEADYHCAVWDDTLRAVIFGGGTKLTVL

SEQ ID NO: 19640 - protein, 110 aa, Artificial Sequence
  Synthetic polypeptide representing artificial human antibody VL domain
QAGLAQPPSMSRDLGQTATLTCTGNSNNVGNEGAAWLQQHQGHPPKLLAYKNNNRPSGISERFSASRSGNTASLTISGLQPEDEADYYCSAWDSSLNVRVFGGGTHLTVL

SEQ ID NO: 19641 - protein, 111 aa, Artificial Sequence
  Synthetic polypeptide representing artificial human antibody VL domain
QSALTQPASLSGSPGQSITLSCTGTSNDIGGYNLVSWYRQHPGEAPKLLLFDVTERPSGVSDRFSGSKSGNTASLTISGLLREDEADYYCSSFTSDSTHLIFAGGTRLTVL

SEQ ID NO: 19642 - protein, 113 aa, Artificial Sequence
  Synthetic polypeptide representing artificial human antibody VL domain
DIVMTQSPDSLGVSLGDRATINCKSSHSLLHSSNSKNYLAWFQQKPGQPPKLLLYWASTRESGFPDRFSGSGSGTDFTLTISNLQAEDVAVYHCQQYYSHPYTFGQGTKLDIK

SEQ ID NO: 19643 - protein, 112 aa, Artificial Sequence
  Synthetic polypeptide representing artificial human antibody VL domain
DIVMTQSPLSSSVTLGQSASISCRSSQSLLHHNGNTYLSWFHQRPGQPPRLLIYKISERFSGVPDRFSGNGAGTDFTLKISRVEAEDVGVYYCLQSTQFPRTFGQGTMLEIK

SEQ ID NO: 19644 - protein, 110 aa, Artificial Sequence
  Synthetic polypeptide representing artificial human antibody VL domain
NFMLAQPLSVSESPGKTVTVSCTRNSGSIGSNHVQWYQQRPGRVPTLVIYDHKKRPSGVSDRFSGSIDASSNSASLTISGLTTEDEADYYCQSYDRGVMVIGGGTKVTVL

SEQ ID NO: 19645 - protein, 111 aa, Artificial Sequence
  Synthetic polypeptide representing artificial human antibody VL domain
NFILTQPHSVSESPGKTVVVSCTRSSGSIANNFVQWYQQRPGSAPTTIIYENDKRPSGVPDRFSGSIDRPSNSASLTISGLRTEDEADYHCQSYDSSNQIIFGGGTKLTVL

SEQ ID NO: 19646 - protein, 107 aa, Artificial Sequence
  Synthetic polypeptide representing artificial human antibody VL domain
EIGMTQFPATLSVSPGERATLSCRASQSVSRALAWYQQKPGQAPRLLIYGASIRATGIAARFSGSGSGTEFTLTISSLQSEDFALYYCQHYYEWPITFGQGTRLEIK

SEQ ID NO: 19647 - protein, 108 aa, Artificial Sequence; identical to SEQ ID NO: 19078
  Synthetic polypeptide representing artificial human antibody VL domain

SEQ ID NO: 19648 - protein, 111 aa, Artificial Sequence
  Synthetic polypeptide representing artificial human antibody VL domain
QSVLTQPPSVSGAPGQRVTISCTGSGSNIGANFDVHWYRHLPGTAPKLLIYGYSNRPSGVPDRFSGSKSGASASLAIIGLQAEDEADYYCQSYDSSLSGWVFGGGTKLTVL

SEQ ID NO: 19649 - protein, 113 aa, Artificial Sequence
  Synthetic polypeptide representing artificial human antibody VL domain
QSPLTQPASVSGSPGQSITISCTGTSSDIGGYDSVSWYQQHPAKAPKLIIYDVSNRPSGVSNHFSGSKSGNTASLTISGLRADDEADYYCSSYTRRSNTVTVVFGGGTKLTVL

SEQ ID NO: 19650 - protein, 110 aa, Artificial Sequence; identical to SEQ ID NO: 19106
  Synthetic polypeptide representing artificial human antibody VL domain

SEQ ID NO: 19651 - protein, 112 aa, Artificial Sequence
  Synthetic polypeptide representing artificial human antibody VL domain
DIVMTQTPLSSPVTLGQPASISCRSSQSLVHSDGNTYLGWLQQRPGQPPRPLIYKISNRLSGVPDRFIGSGAGTDFTLQITRVEAEDVGIYYCMQATQFPWTFGQGTKVEIK

SEQ ID NO: 19652 - protein, 107 aa, Artificial Sequence
  Synthetic polypeptide representing artificial human antibody VL domain
DIQMTQSPSTLSASVGDRATITCRASRDIHNWLAWYQQKPGKAPRLLIYKANTLESGVPSRFSGSGSGTEFTLTISSLQPDDFATYYCQQYETYSWTFGQGTKVEVK

SEQ ID NO: 19653 - protein, 110 aa, Artificial Sequence
  Synthetic polypeptide representing artificial human antibody VL domain
QSALTQPPSASAAPGQRVAISCSGNASNVAINYVSWYQHFPGTAPRVVVHDNDKRPSGISDRFSGSKSGTTATLGITGLQTGDEADYYCATWDRSLSAWVFGGGTKLTVL

SEQ ID NO: 19654 - protein, 108 aa, Artificial Sequence; identical to SEQ ID NO: 19123
  Synthetic polypeptide representing artificial human antibody VL domain

SEQ ID NO: 19655 - protein, 110 aa, Artificial Sequence
  Synthetic polypeptide representing artificial human antibody VL domain
QSVVTQPPSASGTPGQRVTISCSGSSSNIGRYAVNWYQLLPGTAPKLLIYGNSLRPSRVPDRFSGSKSGTSASLAISGLLPDDEADYYCAVWDDSLNGPVFGGGTKVTVL

SEQ ID NO: 19656 - protein, 109 aa, Artificial Sequence
  Synthetic polypeptide representing artificial human antibody VL domain
EIVLTQSPGTLSLSPGERATLSCRASQSVRKNYLAWYQQKPGQAPRLLIFGASSRPGGIPDRFSGSGSGTDFTLTISRLEPEDFAVYFCQQYDRTPPVTFGQGTRLEIK

SEQ ID NO: 19657 - protein, 107 aa, Artificial Sequence
  Synthetic polypeptide representing artificial human antibody VL domain
DIQMTQSPSTLSASVGDRVTITCRASQSISIWLAWYQQKPGKAPKLLTYKASTLERGVSSRFSGSGSGTEFTLTITSLQPDDSATYYCQHYSAYPPTFGGGTKVEIK

SEQ ID NO: 19658 - protein, 112 aa, Artificial Sequence
  Synthetic polypeptide representing artificial human antibody VL domain
DIVMTQSPLSLPVTPGEPASISCRSSQSLLNFNGYTHFAWYLQRPGQSPQVLINLGSNRASGVPDRFSGSGSGTDFTLKISRVEADDVGIYYCMQALQIPYTFGQGTKLEIK

SEQ ID NO: 19659 - protein, 111 aa, Artificial Sequence
  Synthetic polypeptide representing artificial human antibody VL domain
QSVLAQPPSASGTPGQRVIISCSGGWSNIATNYVYWYQQFPGTAPRLLIFNNNQRPSGVPDRFSASKSGTSASLAISGLRSEDEADYYCAAWDDRLRGSWVFGGGTRVSVL

SEQ ID NO: 19660 - protein, 110 aa, Artificial Sequence
  Synthetic polypeptide representing artificial human antibody VL domain
QSVVTQPPSVSGTPGQRVTISCSGSSSNIGTYTVNWYQHLPGTGPKLLIYSNDGRPSRVPDRFSGSKSGTSASLAISGLQSEDEADYYCATWDDSLKGPVFGGGTKLTVL

SEQ ID NO: 19661 - protein, 111 aa, Artificial Sequence
  Synthetic polypeptide representing artificial human antibody VL domain
QLVLTQSPSASASLGASVKVTCTLSSGHSSYAIAWHQQQPEKGPRYLMKLNSDGSHSKGDGIPDRFSGSSSGAERYLTISSLQSEDEADYYCQTWGTGSWVFGGGTKLTVL

SEQ ID NO: 19662 - protein, 108 aa, Artificial Sequence
  Synthetic polypeptide representing artificial human antibody VL domain
EIVMTQSPDTLSVSPGERATLSCRASQTVHNKVAWYQQKPGQAPRLLIYDASTRATGVPVRFGGSGSGTEFTLTISSLQPDDLAIYYCQQYRMWPPLTFGGGTKVAIK

SEQ ID NO: 19663 - protein, 110 aa, Artificial Sequence
  Synthetic polypeptide representing artificial human antibody VL domain
QSVLTQPPSASGAPGQRVAISCSGSSSNFGSNTVNWYQQLPRTAPKLLIYSSNQRPSGVPDRFSGSKSGTSASLAISGLQSEDEADYYCATWDDSLNGPVFGGGTKLTVL

SEQ ID NO: 19664 - protein, 109 aa, Artificial Sequence
  Synthetic polypeptide representing artificial human antibody VL domain
EIVLTQSPGTLSLSPGERATLSCRASQSVSSTYLDWYQQKPGQAPRLLIYGASNRATGIPDRFSGSGSGTDFTLTISRLEPEDFAVYYCQQYGSSFAYTFGQGTKVEIK

SEQ ID NO: 19665 - protein, 110 aa, Artificial Sequence
  Synthetic polypeptide representing artificial human antibody VL domain
QSVLTQPPSVSAAPGQKVTISCSGSSSNIENNFVSWYQQLPGTAPKLLIFDNNKRPSGIPDRFSGSKSGTSATLGITGLQTGDEADYYCGTWDNSLSAGVFGGGTKLTVL

SEQ ID NO: 19666 - protein, 110 aa, Artificial Sequence
  Synthetic polypeptide representing artificial human antibody VL domain
QSVLTQPPSLSAAPGQRVTISCSGSFSNIGKNFVSWYQQVPGTAPRLLIYDDDRRPSGSPGGVSGSKSGTSATLVITGLQTGDEGDYFCGAWDSDLAIYVFGSATRVTVL

SEQ ID NO: 19667 - protein, 110 aa, Artificial Sequence
  Synthetic polypeptide representing artificial human antibody VL domain
QSVVTQPPSASGTPGQRVTISCSGSSSNIGRYAVNWYQLLPGTAPKLLIYGNSLRPSRVPDRFSGSKSGTSASLAISGLLSDDEADYYCAVWDDSLNGPVFGGGTKVTVL

SEQ ID NO: 19668 - protein, 110 aa, Artificial Sequence
  Synthetic polypeptide representing artificial human antibody VL domain
QSVLTQPPSASGTPGQRVIISCSGSTTNIGGTYVYWYQQVPGTAPKLLIYSNDQRPSGVPDRFSGSKSGTSASLAISGLRSEDEADYYCSAWDYSLNGRLFGGGTRLTVL

SEQ ID NO: 19669 - protein, 112 aa, Artificial Sequence
  Synthetic polypeptide representing artificial human antibody VL domain
DIVMTQSPLSLPVTPGEPASISCRSSQSLLHSNGYNYLDWYLQKPGQSPQLLISLGSHRASGVPDRFSGSGSGTDYTLKISRVEAEDVGVYYCMQALQTARSFGQGTKLEIK

SEQ ID NO: 19670 - protein, 110 aa, Artificial Sequence
  Synthetic polypeptide representing artificial human antibody VL domain
QSVVTQPPSASGTPGQRVTISCSGSSSNIGTYTVNWYQHVPGTGPKLLIYSNDGRPSRVPDRFSGSKSGTSASLAISGLQSEDEADYYCATWDDSLKGPVFGGGTKLTVL

SEQ ID NO: 19671 - protein, 110 aa, Artificial Sequence
  Synthetic polypeptide representing artificial human antibody VL domain
QSVVTQPPSASGTPGQRVTISCSGSSSNIGSYTVNWYQHLPGTGPKLLIYSNDGRPSRVPDRFSGSKSGTSASLAISGLQSEDEADYYCATWDDSLKGPVFGGGTKLTVL

SEQ ID NO: 19672 - protein, 109 aa, Artificial Sequence
  Synthetic polypeptide representing artificial human antibody VL domain
QSVLTQPPSVSGAPGQRVTISCTGSSSNIGADYNVHWYQQLPGTAPKLLIYGNNNRPSGVPDRFSGSKSGTSASLAITGLQAEDEADYYCQSYDNNLWVFGEGTKLTVL

SEQ ID NO: 19673 - protein, 112 aa, Artificial Sequence
  Synthetic polypeptide representing artificial human antibody VL domain
DIVMTQTPLSSPVTLGQPASISCRSSQSLVHSNGNTYLSWLQQRPGQPPRLLIYQVSNRFSGVPERFSGSGAGTDFTLEISRVEAEDVGLYFCMQATEFPRTFGQGTKLEIK

SEQ ID NO: 19674 - protein, 107 aa, Artificial Sequence
  Synthetic polypeptide representing artificial human antibody VL domain
DIQMTQSPSSLSASVGDRVTITCQASQDVRNNLNWYQQKPGKAPKLLIYDASNLETGVPSRFSGSESGTDFTFTISSLQPEDIGTYYCQHYDSLPLTFGGGTKVEIK

SEQ ID NO: 19675 - protein, 109 aa, Artificial Sequence
  Synthetic polypeptide representing artificial human antibody VL domain
AIQLTQSPSSLSASVGDRVTITCRASQGIDSALAWYQQKPGKPPKLLIYDASSLNSGVPSRFSGDGSGTDFTLTISSLQPEDFATYHCQQVTSYRQGCTFGQGTRVEIK

SEQ ID NO: 19676 - protein, 107 aa, Artificial Sequence
  Synthetic polypeptide representing artificial human antibody VL domain
DIQMTQSPSTLSASVGDRVTITCRASQSISIWLAWYQQTPGKAPRLLISKASSLHSGVPLRFSGSGSGTEFTLTISSLQPDDSATYYCQHYDGYSITFGQGTRLEIK

SEQ ID NO: 19677 - protein, 108 aa, Artificial Sequence; identical to SEQ ID NO: 18812
  Synthetic polypeptide representing artificial human antibody VL domain

SEQ ID NO: 19678 - protein, 110 aa, Artificial Sequence
  Synthetic polypeptide representing artificial human antibody VL domain
QSALTQPRSVSGSPGQSVTISCSGTNSDVGGYNSVSWYQQRPGEAPKLMIFDVNKRPSGVPERFSGSKSGNTASLTISGLQADDEADYHCCSYAGTYTWVFGGGTKLTFL

SEQ ID NO: 19679 - protein, 110 aa, Artificial Sequence
  Synthetic polypeptide representing artificial human antibody VL domain
QSVLTQPPSVSAAPGQKVTISCSGSSSNIGNNYVSWYQQLPGTAPKLLIYDNNKRPSGIPDRFSGSKSGTSATLGITGLQTGDEADYYCGTWDGSLSAVVFGGGTKLTVL

SEQ ID NO: 19680 - protein, 107 aa, Artificial Sequence
  Synthetic polypeptide representing artificial human antibody VL domain
DIQMTQSPSSLSASVGDSVTITCRASQGISNYLAWVQQKPGKGPKSLIYGASSLQSGVPSRFNGRGTGRDFTLTINSLQPEDFATYYCQQYASYPLTFGGGTKVEIK

SEQ ID NO: 19681 - protein, 107 aa, Artificial Sequence
  Synthetic polypeptide representing artificial human antibody VL domain
DIQLTQSPSFLSASVGDRVTITCRASQGISTYLAWYQQRPGKAPKLLIYAASTLQSGVPSRFSGSGSGTEFTLTISSLQPEDFATYYCQQLNRYPLTFGGGTKVEIK

SEQ ID NO: 19682 - protein, 110 aa, Artificial Sequence; identical to SEQ ID NO: 19660
  Synthetic polypeptide representing artificial human antibody VL domain

SEQ ID NO: 19683 - protein, 110 aa, Artificial Sequence
  Synthetic polypeptide representing artificial human antibody VL domain
QSVVTQPPSASGTPGQRVTISCSGRSSNIGRYGVNWYQHLPGRGPKLLIYSSDGRPSRVPDRFSGSKSGTSASLAISDLQSEDEADYFCATWDDSVKGPVFGGGTKLTVL

SEQ ID NO: 19684 - protein, 112 aa, Artificial Sequence
  Synthetic polypeptide representing artificial human antibody VL domain
DIVMTQTPLSLFVTVGQPASISCRSSQSLRHSDGNTYLSWLHQRPGQPPRLLIYYIFNRFSGVPDRFSGSGAGTDFTLKISKVEAEDVGVYYCLQATKFPLTFGQGTRLEIK

SEQ ID NO: 19685 - protein, 107 aa, Artificial Sequence
  Synthetic polypeptide representing artificial human antibody VL domain
DIQMTQSPSSLSASVGDSVTITCRASQNIRSYLNWYQLKSGKAPRLLIYAASSLQDGVPSRFLGSGSGTEFTLTISSLQPDDFATYYCLATNNLPYTFGQGTKVEIK

SEQ ID NO: 19686 - protein, 111 aa, Artificial Sequence
  Synthetic polypeptide representing artificial human antibody VL domain
QSALTQPASVSGSPGQSITISCTGTTRDVGNYNLVSWYLQLPGTAPKLLIYEVSQRPSGVSDRFSGSKSGNTASLTISGLQAEDEADYYCSSYTGSNTFAVFGGGTRLTVL

SEQ ID NO: 19687 - protein, 111 aa, Artificial Sequence
  Synthetic polypeptide representing artificial human antibody VL domain
QSALTQPPSASGSPGQSVTISCTGTSSDVGGYNYVSWYQQHPGKAPKLMIYEVSKRPSGVPDRFSGSKSGNTASLTVSGLQAEDEADYYCSSYAGSNNLGVFGGGTKLTVL

SEQ ID NO: 19688 - protein, 107 aa, Artificial Sequence
  Synthetic polypeptide representing artificial human antibody VL domain
DIQMTQSPSTLSASVGDRVTITCRASQSINIWLAWYQQKPGKAPKLLTYKASTLERGVSSRFSGSGSGTEFTLTINSLQPDDSATYYCQHYDTYPPSFGGGTKVEIK

SEQ ID NO: 19689 - protein, 113 aa, Artificial Sequence
  Synthetic polypeptide representing artificial human antibody VL domain
DIVMTQSPDSLAVSLGERATINCKSSQSVLYSSNNKNQLAWYQQKPGQPPKLLIYWASTRESGVPDRFSGSGSATDFTLTISSLQAEDVAVYYCQQCFSTPWTFGQGTKVEIK

SEQ ID NO: 19690 - protein, 110 aa, Artificial Sequence
  Synthetic polypeptide representing artificial human antibody VL domain
QSILTQPPSMSATPGQTVTISCSGSSSNIGSNTVDWYQQLPGLAPKLVIYVNNQRPSDVPDRFFGSKSGTSGSLAISGLQSEDEADYYCAAWDDTLNALVFGGGTKLTVL

SEQ ID NO: 19691 - protein, 107 aa, Artificial Sequence; identical to SEQ ID NO: 19551
  Synthetic polypeptide representing artificial human antibody VL domain

SEQ ID NO: 19692 - protein, 108 aa, Artificial Sequence
  Synthetic polypeptide representing artificial human antibody VL domain
DIQLTQSPSSLSASVGDRVTITCRASQGISNYLGWYQQKPGKSPKLLIYAASTLQSGAPSRFSGSGSGTDFTLTISGLQPEDFATYYCQQLNTYPPRTFGQGTKVEVK

SEQ ID NO: 19693 - protein, 110 aa, Artificial Sequence
  Synthetic polypeptide representing artificial human antibody VL domain
QSALTQPPSASGSLGQSVTISCTGTSNDVGYYNYVSWYQQHPGKAPKLIIYEVVNRPSGVPVRFSGSKSDNTASLTVSGLQTEDEADYFCSSYAATNTLIFGGGTRVTVL

SEQ ID NO: 19694 - protein, 111 aa, Artificial Sequence
  Synthetic polypeptide representing artificial human antibody VL domain
QSVLTQPPSVSGAPGQRVTISCTGSSSNIGAGYAVHWYQQLPRTVPKLLLYGNNNRPSGVPDRFSGSKSGTSASLAITGLQAEDEADYYCQSYDSSLSGVVFGGGTKLTVL

SEQ ID NO: 19695 - protein, 107 aa, Artificial Sequence
  Synthetic polypeptide representing artificial human antibody VL domain
EIVLTQSPATLSLSPGERATLSCRASQSISTYLAWYQHKPGQAPRLLMYDASNRATGIPARFSGSGFGTEFTLTITSLEPEDFAVYFCHQRANFPLTFGGGTKVEIK

SEQ ID NO: 19696 - protein, 113 aa, Artificial Sequence
  Synthetic polypeptide representing artificial human antibody VL domain
DIVVTQSPASLAVSLGERATINCKSSQTVLHNSNDKDCLAWYQQKPGQPPRLLIYWASTRESGVPDRFSGSGSGTDFTLTISSLQAEDVAVYYCQQYYNTPLTFGGGTKVEIK

SEQ ID NO: 19697 - protein, 111 aa, Artificial Sequence
  Synthetic polypeptide representing artificial human antibody VL domain
QSALTQPASVSGSLGQSIIIPCTGTSSDIYTYDLVSWYQQCPGRAPKLIIFQVTRRPLGVSDRFSGSKSENTASLTISGLQTDDECTYYCCSYARDYPNWVFGGGTNLTVL

SEQ ID NO: 19698 - protein, 110 aa, Artificial Sequence
  Synthetic polypeptide representing artificial human antibody VL domain
QSVLMQPPSVSAAPGQKVTISCSGSSSNIGNNFVSWYQHLPGTAPKLLIYDNNKRPSGIPDRFSGSHSDTSATLGITGLQTGDEADYYCGTWDSSLSAAVFGGGTKLTVL

SEQ ID NO: 19699 - protein, 110 aa, Artificial Sequence
  Synthetic polypeptide representing artificial human antibody VL domain
QSALTQPRSVSGSPGQSVTISCTGTSSDVGAYNYVSWYQQYPGKAPKLMIYDLTKRPSGVPDRFSGSKSGNTASLTISGLQTEDEGDYYCCSYAGAYNVLFGGGTRLTVL

SEQ ID NO: 19700 - protein, 110 aa, Artificial Sequence
  Synthetic polypeptide representing artificial human antibody VL domain
QSALTQPASVSGSPGQSITISCTGSSDDVGGYNYVSWYQQQSGKAPKVVIFDVSSRPSGISDRFSASKSGNTASLTISGLQAEDEAYYYCSSYAKHGILVFGGGTKLTVL

SEQ ID NO: 19701 - protein, 110 aa, Artificial Sequence
  Synthetic polypeptide representing artificial human antibody VL domain
QSVLTQPPSASGTPGQRVTIFCSGSTSNIGTNTVNWYQQFPGTAPKLLIYNNNQRPSGVPDRFSDSKSGTTASLAISGLQSEDEADYYCSSWDDSLHGQVFGGGTKLTVL

SEQ ID NO: 19702 - protein, 107 aa, Artificial Sequence
  Synthetic polypeptide representing artificial human antibody VL domain
EIVLTQSPATLSLSPGERATLSCRASQTVSTFLAWYQLKPGQTPRLLIYDTYNRATGIPARFSGSGSGTEFTLTISSLEPEDFAIYFCLQRASLPLTFGGGTKVEIK

SEQ ID NO: 19703 - protein, 108 aa, Artificial Sequence
  Synthetic polypeptide representing artificial human antibody VL domain
QSVLTQPPSASGTPGQRVSISCSGSSSNIGRNNVDWYQQLPGTAPQLLLFNNDQRPSGVPGRFSGSKSGTSASLAISGLRSEDEADYYCAVWADNRWVFGGGTKLSVL

SEQ ID NO: 19704 - protein, 110 aa, Artificial Sequence
  Synthetic polypeptide representing artificial human antibody VL domain
QSALTQPPSVSGSPGQSVTISCTGTSNDVGGYDRVSWYQQPPGTAPKLMIYEVTYRPSGVPDRFSGSKSGNTAALTISGLQAEDEADYYCSSYTGSGTVIFGGGTKLTVL

SEQ ID NO: 19705 - protein, 108 aa, Artificial Sequence
  Synthetic polypeptide representing artificial human antibody VL domain
EIILTQSPGTLSLSPGERATLSCRASQSVANSFLAWFQKKPGQGPRLLIYGTSVRATGTPDRFSGSGSGTEFILTITRLEPEDFALYYCQQYNSPSYTFGQGTSVEIK

SEQ ID NO: 19706 - protein, 110 aa, Artificial Sequence
  Synthetic polypeptide representing artificial human antibody VL domain
QSALTQPRSVSGSPGQSVTIACTGTSSDVGGYNYVSWYQQHPGKAPKLILYDVSRRPSGVPDRFSGSKSGNTASLTISGLQAEDEADYYCSSEADRYLVIFGGGTKLTVL

SEQ ID NO: 19707 - protein, 112 aa, Artificial Sequence
  Synthetic polypeptide representing artificial human antibody VL domain
DVVLTQSPLSLPVTLGQPASISCRSSQSLVDSDRNTYLSWFHQRPGQSPRRLIFKVSNRDSGVPDRFSGSGSGTDFTLKISNVEAEDVGVYYCLQTTHWPLTFGGGTKVEIK

SEQ ID NO: 19708 - protein, 107 aa, Artificial Sequence
  Synthetic polypeptide representing artificial human antibody VL domain
DIQMTQSPSTLSASVGDRVTITCRASQSISSWLAWYQQKPGKAPKLLIYKASSLESGVPSRFSGSGSGTEFTLTISSLQPDDFATYYCQQYNSYLWAFGQGTKVEIK

SEQ ID NO: 19709 - protein, 109 aa, Artificial Sequence
  Synthetic polypeptide representing artificial human antibody VL domain
QSALTQPRSVSGSPGQSVTISCTGTSSDVGGYNYVSWYQQHPGKAPKLMIYDVYKRPSGVLDRFSGSKSGNTASLTISWLQADDEADYYCSSYAGTSVIFGGGTKLTVL

SEQ ID NO: 19710 - protein, 110 aa, Artificial Sequence
  Synthetic polypeptide representing artificial human antibody VL domain
QSVLTQPPSASGTPGQRVTIFCSGTTSNIGSNTVNWYQQFPGAAPKLLIYNNNQRPSGVPDRFSDSKSGTTASLAISGLQSEDEADYYCSSWDDSLHGQVFGGGTKLTVL

SEQ ID NO: 19711 - protein, 111 aa, Artificial Sequence
  Synthetic polypeptide representing artificial human antibody VL domain
DVVMTQSPLSLPVTLGQPASISCRSSQSLVHSDGNTYLNWFQQRPGQSPRRLIYKVSNRDSGAPDRFSGSGSGTDFILKISRVEAEDVGVYYCMQGTHLFTFGPGTKVEIK

SEQ ID NO: 19712 - protein, 111 aa, Artificial Sequence
  Synthetic polypeptide representing artificial human antibody VL domain
QSALTQPPSASGSPGQSVTISCTGTSGDVGGYKFVSWYQHHPGKAPKLLIYEVSKRPSGVPDRFSGSRSGNTASLTVSWLQAEDEAVYYCSSYADTNNFGVFGGGTKLTVL

SEQ ID NO: 19713 - protein, 106 aa, Artificial Sequence
  Synthetic polypeptide representing artificial human antibody VL domain
DIQMTQSPSSLSASIGDRVTITCRASQNIKNYLNWYQQKPGNAPKVLIYEASSLQRGVSSRFSGSGSGTDFTLVISSLQPEDFATYYCQQTYNKATFGQGTRLEIK

SEQ ID NO: 19714 - protein, 110 aa, Artificial Sequence
  Synthetic polypeptide representing artificial human antibody VL domain
QSALSQPPSVSGSPGQSVTISCTGTSNDIGSHDRVSWYQQPPGTVPRLIIFEVSHRPSGVPDRFSGSKSGDTASLTISGLQAEDEADYYCSSYTTTGTVLFGGGTKVTVL

SEQ ID NO: 19715 - protein, 108 aa, Artificial Sequence
  Synthetic polypeptide representing artificial human antibody VL domain
EIVLTQSPGPLSLSPGERASLSCRTSQSISSSYLAWYQQKPGQAPSLLIYGGSKRATGIPDRFSGSGSGTDFTLTISRLEPEDFAVYYCQQYGHSPWTFGQGTKVDIK

SEQ ID NO: 19716 - protein, 108 aa, Artificial Sequence
  Synthetic polypeptide representing artificial human antibody VL domain
EIVLTQSPGTLSLSPGERATLSCRASQSVTSSHLAWYQQKPGQAPRLLIYVASSRATGIPDRFSGSGSGTDFTLTISRVEPEDVAVYYCQQYGNSPLTFGQGTNLEIK

SEQ ID NO: 19717 - protein, 108 aa, Artificial Sequence
  Synthetic polypeptide representing artificial human antibody VL domain
EIVLTQSPGTLSLSPGERATLSCRASQSLSGAYLAWYQQKPGQAPSLLIYGASRRAPGIPDRFSGSGSGTDFTLTISRLEPEDFAIYYCQQYSTSPRTFGQGTKVQIK

SEQ ID NO: 19718 - protein, 110 aa, Artificial Sequence
  Synthetic polypeptide representing artificial human antibody VL domain
QSALTQPRSVSGSPGQSVTISCTGTNSDVGAYNYVSWYQQHPGKAPKLMIYDLTKRPSGVPDRFSGSKSGNTASLTISGLQTEDEGDYYCSSYAGAYIVIFGGGTKLTVL

SEQ ID NO: 19719 - protein, 111 aa, Artificial Sequence
  Synthetic polypeptide representing artificial human antibody VL domain
QSALTQPPSASGSPGQSVTISCTGTSSDVGGYNYVSWYQQHPGKAPKLMIYEVNKRPSGVPDRFFGSKSGNTASLIVSGLQAEDEADYYCSSFAGSDNPFVFGTGTKVTVL

SEQ ID NO: 19720 - protein, 107 aa, Artificial Sequence
  Synthetic polypeptide representing artificial human antibody VL domain
DIQMTQSPSSLSASVGDRVTITCRASQSIGDWLAWYQQKPGKAPKLVIYKASTLENGVPLRFSGSGSGTEFTLTITSLQPDDFATYYCQQYSDNSNTFGQGTSLQMK

SEQ ID NO: 19721 - protein, 106 aa, Artificial Sequence
  Synthetic polypeptide representing artificial human antibody VL domain
SYELTQPPSVSVSPGQTASITCSGDKLGDRYACWYQQRPGQSPVLVIYEDDKRPSGIPERFSGSNSGNTATLTISGTQAMDEADYYCQAWDSSTGVFGGGTKLTVL

SEQ ID NO: 19722 - protein, 107 aa, Artificial Sequence
  Synthetic polypeptide representing artificial human antibody VL domain
DIQLTQSPSSLSASVGDRVTITCRASQGISSYLAWYQQKPGKAPKLLIYAASTLESGVPSRFSGSGSGTDFTLIISSLQPEDFATYYCQQLNSYPYTFGQGTKLEIK

SEQ ID NO: 19723 - protein, 107 aa, Artificial Sequence
  Synthetic polypeptide representing artificial human antibody VL domain
DIQMTQSPSSLSASVGDKVTITCRASQGISNYLAWYQQKPGKVPNLLIYTASTLQSGVPSRFSGSGSGTDFTLTISSLQPEDVATYYCQKYNSAPWTFGQGTKVEIK

SEQ ID NO: 19724 - protein, 110 aa, Artificial Sequence
  Synthetic polypeptide representing artificial human antibody VL domain
QSALTQPPSVSGSPGQSVTISCTGTNSDIGTYDRVSWYQQPPGTTPKLLIYEVTYRPSGVPVRFSGSKSGNTASLTISGLQAEDEADYYCSSYITSGGVIFGGGTKLTVL

SEQ ID NO: 19725 - protein, 110 aa, Artificial Sequence
  Synthetic polypeptide representing artificial human antibody VL domain
QSVLTQPPSASGTPGQRVTISCSGSSSNIGSHTVNWYRQVPGAAPSLLIYNHSRRPSGVPERFSGSKSGTSASLAISGLQSEDEADYYCAAWESTLNAWVFGGGTKLTVL

SEQ ID NO: 19726 - protein, 107 aa, Artificial Sequence
  Synthetic polypeptide representing artificial human antibody VL domain
DIQMTQSPSTLSASVGDRVTITCRASQSISTSLAWYQQKPGTAPKLLIYKASTLETGVPSRFSGSGSGTEFTLTVSSLQPDDFATYYCQQYNDYSFAFGPGTKVDIK

SEQ ID NO: 19727 - protein, 112 aa, Artificial Sequence
  Synthetic polypeptide representing artificial human antibody VL domain
DVVMTQSPLSLPVTLGQPASISCRSSQSLVHSDGNTYLIWFRQRPGLSPRRLIYKVSNRDPGVPDRFSGSGSGTDFILKISRVEAEDVGVYYCMQGTHWPWTFGQGTKVEIK

SEQ ID NO: 19728 - protein, 112 aa, Artificial Sequence
  Synthetic polypeptide representing artificial human antibody VL domain
QSILTQPPSVSGAPGQRVTISCTGSSSNIGAGYPVNWYQQFPGAGPKLLIYENMHRPSGVPDRFSGSNSGTSASLTITGLQAEDEADYFCQSYGRDLAGLYVFGTGTRVTVL

SEQ ID NO: 19729 - protein, 113 aa, Artificial Sequence
  Synthetic polypeptide representing artificial human antibody VL domain
DIVMTQSPDSLAVSLGERATINCKSSQSVLYSSNNKNYLAWYQQKPGQPPKLLIYWASTRESGVPDRISGSGSGTDFTLTISSLQAEDVAVYYCQQYYSTPQTFGQGTKLEIK

SEQ ID NO: 19730 - protein, 110 aa, Artificial Sequence
  Synthetic polypeptide representing artificial human antibody VL domain
QSGLTQPPSASGTPGQRVTISCSGSSFNIGRNNVYWYKQVPGAAPNLLICKNDQRPSGVPDRFSGSKSGASASLAISGLHSEDEADYYCATWDGSLSAWVFGGGTKLTVL

SEQ ID NO: 19731 - protein, 107 aa, Artificial Sequence
  Synthetic polypeptide representing artificial human antibody VL domain
EIVLTQSPATLSLSPGERVTLSCRASQSVSTYLAWYQQKPGQAPRLLMYDASIRATGIPARFSGRGSGTEFTLTISSLEPEDFAVYFCQQRAKLPLTFGGGTKVEIK

SEQ ID NO: 19732 - protein, 113 aa, Artificial Sequence
  Synthetic polypeptide representing artificial human antibody VL domain
DIVMTQSPDSLAVSLGERATINCKSSQSILHSGTNKNRLAWFQQKPGQPPKLLIYWASTRDSGVPDRFSGRESGTDFTLTISSLQAEDVAVYFCQQYHSPPLTFGGGTKVEIK

SEQ ID NO: 19733 - protein, 111 aa, Artificial Sequence
  Synthetic polypeptide representing artificial human antibody VL domain
QSALTQPASVSGSPGQSITLSCTGSSSDVGSYDLVSWYQQCPGKPPRLILYQVNRRPSGISDRFSGSKSDKTASLTISGLQTEDEATYYCCSYATNYPNWVFGGGTKLTVL

SEQ ID NO: 19734 - protein, 106 aa, Artificial Sequence
  Synthetic polypeptide representing artificial human antibody VL domain
EIVLTQSPATLSLSPGERATLSCRASQSVSSYLAWYQQKPGQAPRLLIYDASNRATGIPARFSGSGSGTDFTLTISSLEPEDFAVYYCQQRSNWYTFGQGTKLEIK

SEQ ID NO: 19735 - protein, 108 aa, Artificial Sequence
  Synthetic polypeptide representing artificial human antibody VL domain
SYELTQPPSVSVSPGQTARITCSGDALPKKYAYWYQQKSGQAPVLVIYEDSKRPSGIPERFSGSSSGTMATLTISGAQVEDEADYYCYSTDSSGNHGVFGTGTKITVL

SEQ ID NO: 19736 - protein, 111 aa, Artificial Sequence
  Synthetic polypeptide representing artificial human antibody VL domain
QLVLTQSPSASASLGASVKLTCILGTEHSGNAIAWHQQHPERGPRFLMKLNSDGSHFRGDGIPDRFSGSSSGTERYLTISSLQSEDEADYYCQTWGPGIQVFGGGTKLTVL

SEQ ID NO: 19737 - protein, 110 aa, Artificial Sequence
  Synthetic polypeptide representing artificial human antibody VL domain
QSALTQPPSVSGSPGQSVTISCTGTSSDVGSYNRVSWYQQSPGTAPKLMIYEVSYRPSGVPDRFSGSKSDNTASLTISGLQAEDGADYYCSSYTSSNTIIFGGGTRLTVL

SEQ ID NO: 19738 - protein, 110 aa, Artificial Sequence
  Synthetic polypeptide representing artificial human antibody VL domain
QSALTQPASVSGSPGQSITIPCTGTSRDIGTYNRVSWYQQHPDKAPKLLIYEATKRPSGVSNRFSGSRSGHTASLTITGLQAEDEADYYCSAYAGSNTFPFGGGTKLTVL

SEQ ID NO: 19739 - protein, 113 aa, Artificial Sequence
  Synthetic polypeptide representing artificial human antibody VL domain
DIVMTQSPDSLAVSLGERATMNCKSSQSILHSPTNKNRLAWYQEKPGQPPKLLIYWASIREAGVPDRFRGSGSGTDFTLTISSLQAEDVAVYYCQQYLSPPLTFGGGTKVEIK

SEQ ID NO: 19740 - protein, 109 aa, Artificial Sequence
  Synthetic polypeptide representing artificial human antibody VL domain
EIVLTQSPVTLSLSPGEGATLSCRASQSVGNSLAWYQQRPGQAPRLLIYDASNRATGIPARFSGSGSGTDFTLTIGNLQPEDFAIYYCQQRNNWPPQVTFGGGTKVEIK

SEQ ID NO: 19741 - protein, 110 aa, Artificial Sequence
  Synthetic polypeptide representing artificial human antibody VL domain
QSALTQPRSVSGSPGQSVTISCTGTSSDVGGYNYVSWYQQHPGKAPKLMIFDVTRRPSGVPDRFSGSKSGNTASLTISGLQAEDEADYYCSSEADRYLVVFGGGTKLTVL

SEQ ID NO: 19742 - protein, 107 aa, Artificial Sequence
  Synthetic polypeptide representing artificial human antibody VL domain
DIQMTQSPSSLSAAVGDRVTITCRASQGIANFLAWYQQRPGKVPKLLIYPASTLQSGVPSRFSGSGSGTDFTLTISGLQPEDVATYYCQKFNSAPWTFGQGTKVEIK

SEQ ID NO: 19743 - protein, 106 aa, Artificial Sequence
  Synthetic polypeptide representing artificial human antibody VL domain
SYELTQPPSVSVSPGQTATITCSGDNLVDRFACWYQQKTGQSPVLVIYQDNERPSGIPERFSGSNSGNTATLTISGTQVMDEADYYCQAWDSRAYVFGTGTTLTVL

SEQ ID NO: 19744 - protein, 109 aa, Artificial Sequence
  Synthetic polypeptide representing artificial human antibody VL domain
QAVVTQEPSLTVSPGGTVTLTCGSNTGVVTSGHYPYWLQQKPGQAPRTLIYDTSNTHSWTPARFSGSLVGGKAALTLSGAQPEDEAEYYCFLSYGGARVFGGGTKLTVL

SEQ ID NO: 19745 - protein, 108 aa, Artificial Sequence
  Synthetic polypeptide representing artificial human antibody VL domain
EIVMTQSPATLSVSPGERVTLSCRASQSVGSKLAWYQQRPGQAPRLLMYGVSIRATGIPARFSGSGSGTDFTLTVSSLQSDDFAVYYCQQYNNWPPLAFGQGTKLEIK

SEQ ID NO: 19746 - protein, 111 aa, Artificial Sequence
  Synthetic polypeptide representing artificial human antibody VL domain
QSVLTQPPSASGTPGQRVTISCSGSSSNIGSNTVNWYQQLPGMAPKLLIYSNNQRPSGVPDRFSGSKSGTSASLAISGLQSEDEAAYYCVAWDDSLNGLYVFGTGTSVTVL

SEQ ID NO: 19747 - protein, 110 aa, Artificial Sequence
  Synthetic polypeptide representing artificial human antibody VL domain
QSALTQPPSVSGSPGQSVTISCTGTSSDVGIYNRVSWYQQSPGTAPKLMIFEVSNRPSAVPDRFSASKSGNTASLTISGLQAEDEADYYCSSYTSSSTVIFGGGTKLTVL

SEQ ID NO: 19748 - protein, 113 aa, Artificial Sequence
  Synthetic polypeptide representing artificial human antibody VL domain
DIVMTQSPDSLAVSLGERATINCKSSRSVLYNSNNKNYLAWYQHKPGHPPKLLIYLASTREPGVPDRFSGSGSGTDFTLTISSLQAEDVAVYYCQQYYDTPRTFGQGTKVEIK

SEQ ID NO: 19749 - protein, 108 aa, Artificial Sequence
  Synthetic polypeptide representing artificial human antibody VL domain
EIVLTQSPGTLSLSPGERATLSCRASQSLSGGQLAWYQQKPGQAPRLLIYGASSRTTGIPDRFSGSGSGTGFTLTISRLEPEDFAVYYCQQYGNSRLTFGQGTKLEIK

SEQ ID NO: 19750 - protein, 110 aa, Artificial Sequence
  Synthetic polypeptide representing artificial human antibody VL domain
QSALTQPRSVSGSPGQSVTISCTGTSSDVGAYNYVSWYQQHPGKAPKLMIYDLSRRPSGVPDRFSGSKSGYTASLTISGLQTEDEADYYCSSYAGSYIVVFGGGTKLTVL

SEQ ID NO: 19751 - protein, 106 aa, Artificial Sequence
  Synthetic polypeptide representing artificial human antibody VL domain
DIQMTQSPSSLSASVGDRVTITCRASRDIRTWLVWYQQQGGKAPNLLIKAASFLQTGVPSRFNGSGSGTDFTLTISGLQPEDSAVYYCQQATSPYTFGQGTKLEIK

SEQ ID NO: 19752 - protein, 107 aa, Artificial Sequence
  Synthetic polypeptide representing artificial human antibody VL domain
DIQMTQSPSTLSASVGDRVTITCRASQSVSSWLAWYQQKPGRAPKLLMYKASTLESGVPSRFSGSGSGTEFTLTITSLQPDDFATYFCQHYRSSSWTFGQGTKVEIK

SEQ ID NO: 19753 - protein, 107 aa, Artificial Sequence
  Synthetic polypeptide representing artificial human antibody VL domain
DIQMTQSPSSVSASVGDSVTFTCRASQGINIWLAWYQRKPGKPPNLLIYEGTILRSGVPSRFSGRRSGADFTLTISGLQPEDFGTYYCQQVNSFPYTFGQGTELEIK

SEQ ID NO: 19754 - protein, 110 aa, Artificial Sequence
  Synthetic polypeptide representing artificial human antibody VL domain
QSALTQPPSVSGSPGQSVTISCTGTSNDVGGYDRVSWYQQPPGTAPKLMIYEVTYRPSGVPDRFSGSKSGNTAALTISGLQAEDEADYYCSSYTGSGTVVFGGGTKLTVL

SEQ ID NO: 19755 - protein, 111 aa, Artificial Sequence
  Synthetic polypeptide representing artificial human antibody VL domain
QSVLTQPPSVSGAPGQRVTISCTGSSSNIGPGYGVHWYQQLPGTAPKLLIYGNSNRPSGVPDRFSGSKSGTSASLAITGLQAEDEADYYCQSYDSSLSGSVFGGGTKLTVL

SEQ ID NO: 19756 - protein, 107 aa, Artificial Sequence
  Synthetic polypeptide representing artificial human antibody VL domain
DIQMTQSPSSVSASVGDRVTITCRASQGISSWLAWYQQKPGKAPKLLIYAASSLQSGVPSRFSGSGSGTDFTLTISSLQPEDFATYYCQQANSFPRTFGQGTKVEIK

SEQ ID NO: 19757 - protein, 113 aa, Artificial Sequence
  Synthetic polypeptide representing artificial human antibody VL domain
DIVMTQSPDSLAVSLGERATINCKSSQSVFQSTTNKNYLAWYQKKPGQPPKLLIHWASIREFGVPDRFSGSGSGTDFTLTISSLQAEDVAVYFCQHYHTVPRTFGQGTKVEIK

SEQ ID NO: 19758 - protein, 108 aa, Artificial Sequence
  Synthetic polypeptide representing artificial human antibody VL domain
EIVLTQSPPTLSLSPGERATLSCRASQTFGNYLAWYQQKPGQAPRLLIYDVSNRAAGVPARFSGSGSATDFTLTISSLEPEDSGVYYCQPRGSWRGFTFGPGTKVDIK

SEQ ID NO: 19759 - protein, 107 aa, Artificial Sequence
  Synthetic polypeptide representing artificial human antibody VL domain
EIVMTQSPATLSVSPGERATLSCRASQSVTTNLAWYQHKPGQAPRLLIYDSSTRATGIPARFSGSGSGTDFTLTISSLQSEDFAVYYCQHYNIWPYTFGQGTKLEIK

SEQ ID NO: 19760 - protein, 108 aa, Artificial Sequence
  Synthetic polypeptide representing artificial human antibody VL domain
EIVLTQSPGTLSLSPGERATLSCRASQSVSSIYLAWYQQKPGQAPRLLIYGASRRATGIPDRFSGSGSGTDFTLTISRLEPEDFAVYYCQQYGGSPRTFGGGTKVEIK

SEQ ID NO: 19761 - protein, 106 aa, Artificial Sequence; identical to SEQ ID NO: 18833
  Synthetic polypeptide representing artificial human antibody VL domain

SEQ ID NO: 19762 - protein, 112 aa, Artificial Sequence
  Synthetic polypeptide representing artificial human antibody VL domain
QSVLTQPPSMSGAPGQGLTISCTGSTSNIGAGYDVHWYHQVPGAAPRLLIYGNTNRPSGVPDRFSGSKSGTAASLAITGLQAEDEGHYYCQSYDRSLSASAVFGGGTKVTVL

SEQ ID NO: 19763 - protein, 106 aa, Artificial Sequence
  Synthetic polypeptide representing artificial human antibody VL domain
SYELTQPPSVSVSPGQTASITCSGDKLGDKYACWYQQKPGQSPVLVIYQDSKRPSGIPERFSGSNSGNTATLTISGTQAMDEADYYCQAWDSSTAGFGGGTKLTVL

SEQ ID NO: 19764 - protein, 107 aa, Artificial Sequence
  Synthetic polypeptide representing artificial human antibody VL domain
DIQLTQSPSTLSASVGDRVTITCRASQTVGASLAWYQQKPGKAPKPLIYRASSLHSGVPSRFSGSGSGTVFTLTISSLQPDDFATYYCHQYDSFSWTFGPGTRVDFK

SEQ ID NO: 19765 - protein, 107 aa, Artificial Sequence
  Synthetic polypeptide representing artificial human antibody VL domain
DIQMSQSPSSVSASVGDRVTITCRASRGINIWLAWYQQRPGRAPKLLIYEANTLQSGVPSRFSGSRSGADFTLTISSLQPEDVATYYCQQLNSFPYTFGQGTKVEIK

SEQ ID NO: 19766 - protein, 110 aa, Artificial Sequence
  Synthetic polypeptide representing artificial human antibody VL domain
QSVVTQPPSASGTPGQRVTIFCSGSTSNIGSNTVNWYQHFPGTAPKLLIYNNNQRPSGIPDRFSDSKSGTTASLAISGLQSEDEADYYCSSWDDILHEQVFGGGTKLTVL

SEQ ID NO: 19767 - protein, 110 aa, Artificial Sequence
  Synthetic polypeptide representing artificial human antibody VL domain
EIVLTQSPGTMSLSPGERATLSCRASQSVSNRYLAWYQQRPGQAPRLLIYGASTRATGIPDRFSGSGSGTDFTLTISRLEPEDFAVYYCQQYGGSPPQLTVGGGTKVEIK

SEQ ID NO: 19768 - protein, 107 aa, Artificial Sequence; identical to SEQ ID NO: 18765
  Synthetic polypeptide representing artificial human antibody VL domain

SEQ ID NO: 19769 - protein, 107 aa, Artificial Sequence
  Synthetic polypeptide representing artificial human antibody VL domain
SYELTQPSSVSVSPGQTARITCSGDVLAKKYARWFQQKPGQAPVLVIYKDSERPSGIPERFSGSSSGTTVTLTISGAQVEDEADYYCYSAADNNGGVFGGGTKLTVL

SEQ ID NO: 19770 - protein, 110 aa, Artificial Sequence
  Synthetic polypeptide representing artificial human antibody VL domain
QSALTQPPSVSGSPGQSVTISCTGTSNDIGSHDRVSWYQQPPGTVPKLMIFEVSHRPSGVPDRFSGSKSGDTASLTISGLQAEDEADYYCSSYTTPGTVVFGGGTKLTVL

SEQ ID NO: 19771 - protein, 107 aa, Artificial Sequence
  Synthetic polypeptide representing artificial human antibody VL domain
DIQMTQSPSSVSASVGDRVTISCRASQGVSSLLAWYQQKPGKAPKLLIYGASSLQSGVPSRFSGSGSETDFTLTISSLQPEDFATYYCQQAYTFPFTFGPGTKVDIK

SEQ ID NO: 19772 - protein, 112 aa, Artificial Sequence
  Synthetic polypeptide representing artificial human antibody VL domain
DIVMTQSPDSLAVSLGERATISCKSSQNVLSSSNNKNYLAWYQQKPGQPPKLLISWASTRESGVPDRFDGSGSGTEFTLTISSLQAEDVAVYYCQQYYNTPTFGQGTKVEIK

SEQ ID NO: 19773 - protein, 107 aa, Artificial Sequence
  Synthetic polypeptide representing artificial human antibody VL domain
DIQMTQSPFTLSASVGDRVTITCRASQSVVTWLAWYQQKPGKAPNLLIYKASNLESGVPSRFSGSGSGTEFALTINSLQPDDFATYYCQQYYILPWTFGQGTKVEIK

SEQ ID NO: 19774 - protein, 113 aa, Artificial Sequence
  Synthetic polypeptide representing artificial human antibody VL domain
DIVMTQSPDSLAVSLGERATITCRSSQSVLHSPTDKNRLAWYQQKLGQPPKLLIYWASFRESGVPDRFSGSGSGTDFTLTINGLQAEDVAVYYCQQYLSPPLTFGGGTKVEIK

SEQ ID NO: 19775 - protein, 109 aa, Artificial Sequence
  Synthetic polypeptide representing artificial human antibody VL domain
QSVLTQPPSASGTPGQGVTISCSGSSSNIGSNPVNWYQQFPGTAPKLLIYNTNQRPSGVPDRFSGSKSGTSASLAISGLQSEDEADYYCAAWDYGLHGLFGGGTKLTVL

SEQ ID NO: 19776 - protein, 107 aa, Artificial Sequence
  Synthetic polypeptide representing artificial human antibody VL domain
DIQMTQSPSTLSASVGDRLTITCRASQSISDWLAWYQQKPGRGPKLLIYKASSLNGGVPSRFTGSGSGTEFTLTISSLQPDDFATYYCQQYTTYSRTFGQGTKVEIK

SEQ ID NO: 19777 - protein, 113 aa, Artificial Sequence
  Synthetic polypeptide representing artificial human antibody VL domain
DIVMTQSPDSLALSLGETATINCKSSHSVFYSSHNKSFLAWYQQKPGQPPKLLIYWASTREFGVPDRFSGSGSGTDFTLTISGLQAEDVAVYFCQHYHSVPRTFGQGTKVEIK

SEQ ID NO: 19778 - protein, 111 aa, Artificial Sequence
  Synthetic polypeptide representing artificial human antibody VL domain
QSVLTQPPSASGTPGQRVTISCSGSSSNIGSNYVYWYQQLPGTAPKLLIYRNNQRPSGVPDRFSGSKSGTSASLAISGLRSEDEADYYCAAWDDSLSGHWVFGGGTKLTVL

SEQ ID NO: 19779 - protein, 107 aa, Artificial Sequence
  Synthetic polypeptide representing artificial human antibody VL domain
EIVLTQSPATLSLSPGERATLSCRASQSVSTYLAWYQQKPGQAPRLLMYDASNRATGIPARFSGRGSGTEFTLTISSLEPEDFAVYFCQQRANLPLTFGGGTKVEIK

SEQ ID NO: 19780 - protein, 107 aa, Artificial Sequence
  Synthetic polypeptide representing artificial human antibody VL domain
AIQMTQSPSSLSASVGDRVTITCRASQGIRNDLGWYQQKPGKAPKLLIYGASNLQSGVPSRFSGSGSDTDFTLTISSLQPEDFATYYCLQDYNYPKTFGQGTRVEIK

SEQ ID NO: 19781 - protein, 113 aa, Artificial Sequence
  Synthetic polypeptide representing artificial human antibody VL domain
DIVMTQSPDSLAVSLGERATINCKSSQSVLSTADNKNYLVWYQQKPGQPPKLLISWASTRESGVPDRFSGSGSGTDFTLTISSLQAEDVAIYYCQQCYGVPLTFGGGTKVEIK

SEQ ID NO: 19782 - protein, 113 aa, Artificial Sequence
  Synthetic polypeptide representing artificial human antibody VL domain
DVVMTQSPLSLPVTLGQPASISCRSSQSLVHSDGNTYLNWFQQRPGQSPRRLIYKVSNRDSGVPDRFSGSGSGTDFTLKISRVEAEDVGVYYCMQGTHWPSWTFGQGTKVEIK

SEQ ID NO: 19783 - protein, 110 aa, Artificial Sequence
  Synthetic polypeptide representing artificial human antibody VL domain
QSALTQPASVSGSPGQSITISCAGTSSDVGGYNLVSWYQQYPGKAPKLIIYEVTKWPSGISDRFSGSKSGNTASLTISGLQADDEADYYCCSYAARGTSVFGGGTKLTVL

SEQ ID NO: 19784 - protein, 112 aa, Artificial Sequence
  Synthetic polypeptide representing artificial human antibody VL domain
DVVVTQSPLSLPVTLGQPASISCRSNQSLVHSDRNTYLSWFHQRPGQSPRRLIFKVSKRDSGVPDRFSGSGSGSDFTLKISNVEAEDVGVYYCLQTTHWPLTFGGGTKVEIK

SEQ ID NO: 19785 - protein, 110 aa, Artificial Sequence
  Synthetic polypeptide representing artificial human antibody VL domain
QSALTQPPSASGSPGQSVTISCTGTSSDIGGYNYVSWYQQHPGEAPKLMIYEVNKRPSGVPDRFSGSRSGNTASLTVSGLQAEDEADYYCASVAGGDNLLFGGGTKLTVL

SEQ ID NO: 19786 - protein, 107 aa, Artificial Sequence
  Synthetic polypeptide representing artificial human antibody VL domain
EIVLTQSPATLSLSPGERATLSCGASQTVSSSYLAWYQQKPGLAPRLLIYDASSRAAGIPDRFSGSGSATDFTLTISRLEPEDFAVYYCQHYAAAITFGGGTKVEIK

SEQ ID NO: 19787 - protein, 108 aa, Artificial Sequence
  Synthetic polypeptide representing artificial human antibody VL domain
EILMTQSPATLSVSPGERATLSCRASQSVGSNLAWYQQKPGQAPRLLIYGAFNRATDVPARFSGSGSGTEFTLTISSLQSEDFAVYYCQHYNTWPRWTFGQGTKVEIK

SEQ ID NO: 19788 - protein, 107 aa, Artificial Sequence
  Synthetic polypeptide representing artificial human antibody VL domain
DIHLTQSPSFLSASVGDRVTITCRASQPMGNYLAWYQQKPGKAPKLLIYAASTLQSGVSSRFTGSGSGTEFTLTISRLQPEDFATYFCQQVHSYPFTFGPGAKVEIK

SEQ ID NO: 19789 - protein, 108 aa, Artificial Sequence
  Synthetic polypeptide representing artificial human antibody VL domain
SSELTQDPAVSVASGQTVKITCQGDSLKTFYATWYQQKPGQAPLLVLYGKNNRPSGIPDRFSGSSSGDTASLTITGAQAEDEADYYCNSRHSSGNYLVFGGGTKLTVL

SEQ ID NO: 19790 - protein, 108 aa, Artificial Sequence
  Synthetic polypeptide representing artificial human antibody VL domain
SYELAQPPSVTVSPGQTARITCSGDALPRKFAYWYQQKSGQAPVVVIYEDSKRPSGIPERFSGSSSGTVATLTITGARVEDEADYYCYSTDRYADHRVFGGGTKLTVL

SEQ ID NO: 19791 - protein, 110 aa, Artificial Sequence
  Synthetic polypeptide representing artificial human antibody VL domain
QSVLTQPPSASGTPGQRITISCSGSSSNIGRNLVTWYQQLPGTAPKLVLYSNNLRPSGVPDRLSGSKSGTSASLAISGLQSEDEADYFCASWDDSLHGYVFGPGTKVTVL

SEQ ID NO: 19792 - protein, 110 aa, Artificial Sequence
  Synthetic polypeptide representing artificial human antibody VL domain
QSVLSQPPSVSGSPGQRVTISCSGSTSNIGSNTVSWYRQFPGGAPKVVIYNHDKRPSGVPDRFSDSKSGTSASLAISGLQSEDEADYYCAVWDDSVNAPVFGGGTKLTVI

SEQ ID NO: 19793 - protein, 107 aa, Artificial Sequence
  Synthetic polypeptide representing artificial human antibody VL domain
EIVLTQSPATLSLSPGERATLSCRASQSVSNSLGWYQQKPGQAPRLLIHEASNRANGIPARFSGSGSGTDFTLTISGLEPEDFAVYYCQHRSNWPLTFGPGTKVDIK

SEQ ID NO: 19794 - protein, 108 aa, Artificial Sequence
  Synthetic polypeptide representing artificial human antibody VL domain
EIVLTQSPGTLSLSPGEGATLSCRASRAVTGNYVAWYQHKPGQAPRLLVYGASNRATGIPDRFSGSGSGRDFTLTLSRLEPEDFAVYYCQQYLTSIGTFGRGTRVEIK

SEQ ID NO: 19795 - protein, 110 aa, Artificial Sequence; identical to SEQ ID NO: 18791
  Synthetic polypeptide representing artificial human antibody VL domain

SEQ ID NO: 19796 - protein, 106 aa, Artificial Sequence
  Synthetic polypeptide representing artificial human antibody VL domain
DIQMTQSPSTLSASVGDRVTITCRASQTIDRWLAWYQQKPGKAPKLLIYETSRLQSGVPSRFGGSGSGTEFTLTISSLQPDDFASYYCQQYKTYPTFGQGTRLQIK

SEQ ID NO: 19797 - protein, 107 aa, Artificial Sequence
  Synthetic polypeptide representing artificial human antibody VL domain
AIQVTQSPPSLSASVGDRVTITCRASQGIGTYLGWYQQKPGKGPKLLIYDASSLQSGVPSRFSGSGSGTDFTLTISSLQLEDFATYYCLQDYLYPATFGQGTKLEIK

SEQ ID NO: 19798 - protein, 113 aa, Artificial Sequence
  Synthetic polypeptide representing artificial human antibody VL domain
DIVMTQSPDSLAVSLGERATINCKSSQSVLWTSNDKNYLAWYQQKPGQPPKLLIYWASTRESGVPDRFSGSGSGTVFTLTISNLQAEDVAVYYCQQYYAVPLTFGGGTQVEIK

SEQ ID NO: 19799 - protein, 110 aa, Artificial Sequence
  Synthetic polypeptide representing artificial human antibody VL domain
QSALTQPSSVSGSRGQSVTISCTGTSTDIGLSNHVSWYQLYPDKAPKLLIYGVSERPSGVSGHFSGSKSGNTASLTISGLQSDDEATYFCNSYSRAGYSVFGGGTKLTVL

SEQ ID NO: 19800 - protein, 113 aa, Artificial Sequence
  Synthetic polypeptide representing artificial human antibody VL domain
DIVMTQSPDSLAVSLGERATINCKSSQSVLYSSNNKNYLAWYQQKPGQPPKLLIYWASTRESGVPDRFSGSGSGTDFTLTISSLQAEDVAVYYCQQYYSTAWTFGQGTKVEIK

SEQ ID NO: 19801 - protein, 108 aa, Artificial Sequence
  Synthetic polypeptide representing artificial human antibody VL domain
EIMLTQSPGTLSLSPGERATLSCRASQSVSSSYLAWYQQKPGQAPRLLIYGASSRATGIPDRFSGSGSGTDFTLTISRLEPEDFAVYYCQQYGSSPYTFGQGTKLEIK

SEQ ID NO: 19802 - protein, 111 aa, Artificial Sequence
  Synthetic polypeptide representing artificial human antibody VL domain
QLVLTQSPSASASLGASVKVACTLSSGQSRYPIAWLQQQPGKGPRYLMKVNNDGSHTKGDGIPDRFSGSSSGAERYLTISSLQSEDEADYYCQTWGTDTWVFGRGTKVTVL

SEQ ID NO: 19803 - protein, 107 aa, Artificial Sequence
  Synthetic polypeptide representing artificial human antibody VL domain
SYDLTQPPSVSVSPGQTATITCSGSNLGDKYTCWYQHKPGQSPVLLIYQNNKRPSGIPERFSGSTSGDTATLTITGTQPIDEADYYCQAWDNRNLDVFGTGTKVTVL

SEQ ID NO: 19804 - protein, 109 aa, Artificial Sequence
  Synthetic polypeptide representing artificial human antibody VL domain
QSALTQPRSVSGSPGQSVTISCTGTSSDVGGYNYVSWYQQHPGKAPKLMIYDVSKRPSGVPDRFSGSKSGNTASLTISGLQAEDEADYYCCSYAGSPYVFGTGTKVTVL

SEQ ID NO: 19805 - protein, 110 aa, Artificial Sequence
  Synthetic polypeptide representing artificial human antibody VL domain
QSALTQPRSVSGSPGQSVTISCTGTSSDVGGYNYVSWYQQHPGKAPKLMIYDVSKRPSGVPDRFSGSKSGNTASLTISGLQAEDEADFYCCSYAGSYTYVFGTGTKVTVL

SEQ ID NO: 19806 - protein, 108 aa, Artificial Sequence
  Synthetic polypeptide representing artificial human antibody VL domain
EIVLTQSPGTLSLSPGERATLSCRASQSVSGNYLAWYQQKPGQAPRLLIYGASSRATGIPDRFSGSGSGTDFTLTISRLEPEDFVVYFCQQYGSSPLTFGGGTKVGIK

SEQ ID NO: 19807 - protein, 109 aa, Artificial Sequence
  Synthetic polypeptide representing artificial human antibody VL domain
QSVLTQPPSVSAAPGQKVTISCSGSGSNIGSSFVSWYQQLPGTAPKLLIYDNDKRPSGIPDRFSGSKSGTSATLGITGLQTGDEADYYCGAWDTGLTVMFGGGTHLTVL

SEQ ID NO: 19808 - protein, 110 aa, Artificial Sequence
  Synthetic polypeptide representing artificial human antibody VL domain
QSVLTQPPSASGTPGQRVTISCSGGISNVRSNPVNWYQQFPGTAPRLLLFSDFQRPSGVPDRFSGSKSGTSASLAITGLQSEDEADYYCAAWDDSLNAWLFGGGTRLTVV

SEQ ID NO: 19809 - protein, 107 aa, Artificial Sequence
  Synthetic polypeptide representing artificial human antibody VL domain
DIQMTQSPSSVSASVGDRVTITCRASQGISSWLAWYQQKPGKAPKLLIYAASSLQSGVPSRFSGSGSGTDFTLTISSLQPEDFATYYCQQANSFPFTFGPGTKVDIK

SEQ ID NO: 19810 - protein, 108 aa, Artificial Sequence
  Synthetic polypeptide representing artificial human antibody VL domain
EIVLTQSPGTLSLSPGERATLSCRASQSVSSSYLAWYQQKPGQAPSLLIYGASSRATGIPDRFSGSGSGTDFTLTISRLEPEDFAVYYCQQYGSSPRTFGQGTKLEIK

SEQ ID NO: 19811 - protein, 107 aa, Artificial Sequence
  Synthetic polypeptide representing artificial human antibody VL domain
DIQMTQSPSSLSASVGDRVTITCRASQSIRIYLNWYQQKPGKAPNLLIYAASTLQSGVSSRFSGSGSGTDFTLTISSLQPEDFATYYCQQSYSTPPTFGGGTKVEIK

SEQ ID NO: 19812 - protein, 108 aa, Artificial Sequence
  Synthetic polypeptide representing artificial human antibody VL domain
EIVMTQSPATLSVSPGETATLSCRASQGVNRNLAWYQRKPGQAPRLLIYNGSTRATGVPARFSGSGSGTDFTLTISSLQSGDFAVYYCQQYDKWPPFTFGPGTTVDIK

SEQ ID NO: 19813 - protein, 107 aa, Artificial Sequence
  Synthetic polypeptide representing artificial human antibody VL domain
DIQMTQSPSSLSASVGDRVTITCRASQGISNYLAWYQHKPGKVPRLLIYSASTLHSGVPSRFSGSGYGTDFTLTISSLQPEDVATYYCQKSDGAPWTFGQGTKVEIK

SEQ ID NO: 19814 - protein, 113 aa, Artificial Sequence
  Synthetic polypeptide representing artificial human antibody VL domain
DVVMTQSPLSLPVTLGQPASISCRSSQSLVHSDGNTYLNWFQQRPGQSPRRLIYKVSNRDSGVPDRFSGSGSGTDFTLKISRVEAEDVGVYYCMQGTHWPPWTFGQGTKVEIK

SEQ ID NO: 19815 - protein, 111 aa, Artificial Sequence
  Synthetic polypeptide representing artificial human antibody VL domain
QSALTQPASVSGSPGQSITISCTGTSSDVGGYNYVSWYQQHPGKAPKLMIYDVSNRPSGVSNRFSGSKSGNTASLTISGLQAADEADYYCSSYTSTSTLVVFGGGTKLTVL

SEQ ID NO: 19816 - protein, 110 aa, Artificial Sequence
  Synthetic polypeptide representing artificial human antibody VL domain
QSVLPQPPSVSAAPGQKVTISCSGSSTNIGHNFVSWYQQLPGAAPKLLIYDTSKRPSAIPDRFSASKSGTSATLDIAGLQTGDEAEYYCGTWDEILGVWVFGGGTKLTVL

SEQ ID NO: 19817 - protein, 111 aa, Artificial Sequence
  Synthetic polypeptide representing artificial human antibody VL domain
DIVMTQSPLSLPVTPGEPASISCRSSQSLLHSNGYNYLDWYLQKPGQSPQLLIYLGSNRASGVPDRFSGSGSGTDFTLKISRVEAEDVGVYYCMQALQTPAFGQGTKVEIK

SEQ ID NO: 19818 - protein, 106 aa, Artificial Sequence
  Synthetic polypeptide representing artificial human antibody VL domain
SYELTQPPSVSVSPGQTASITCSGDKLGDKYACWYQQKPGQSPVLVIYQDSKRPSGIPERFSGSNSGNTATLTISGTQAMDEADYYCQAWDSSTPVFGGGTKLTVL

SEQ ID NO: 19819 - protein, 110 aa, Artificial Sequence
  Synthetic polypeptide representing artificial human antibody VL domain
QSVLTQPPSASGTPGQRVTISCSGSNSNIGSNYIYWYQQLPGTAPKLLIYRNNQRPSGVPDRFSGSKSGTSASLAISGLRSEDEADYYCATWDDSLSGWVFGGGTKLTVL

SEQ ID NO: 19820 - protein, 107 aa, Artificial Sequence
  Synthetic polypeptide representing artificial human antibody VL domain
EIVLTQSPATLSLSPGERATLSCRASQSVSSYLAWYQQKPGQAPRLLIYDASNRATGIPARFSGSGPGTDFTLTISSLEPEDFAVYYCQQRSNWPHPFGQGTRLEIK

SEQ ID NO: 19821 - protein, 113 aa, Artificial Sequence
  Synthetic polypeptide representing artificial human antibody VL domain
DIVMTQSPDSLAVSLGERATINCKSSQTILYSSINKNCLAWYQQKPGQPPKLLIYWASRREIGVPDRFNGSGSGTDFTLTISSLQAEDVAVYYCQQYYSSPYPFGQGTKLEIK

SEQ ID NO: 19822 - protein, 110 aa, Artificial Sequence; identical to SEQ ID NO: 19267
  Synthetic polypeptide representing artificial human antibody VL domain

SEQ ID NO: 19823 - protein, 107 aa, Artificial Sequence
  Synthetic polypeptide representing artificial human antibody VL domain
DIQMTQSPSSLSASIGDRVTISCRASQDISDYLAWYQQRPGEVPKLLIYATSNLQSGVPSRFSGAGSGTDFSLTISSLQPEDVATYYCQMYNTAPWTFGPGTKVEIK

SEQ ID NO: 19824 - protein, 110 aa, Artificial Sequence
  Synthetic polypeptide representing artificial human antibody VL domain
QSALTQPASVSGSPGQSITISCTGTSSDVGSYNLVSWYQQHPGKAPKLMIYEGSKRPSGVSNRFSGSKSGNTASLTISGLQAEDEADYYCYSYAGSSTWVFGGGTKLTVL

SEQ ID NO: 19825 - protein, 110 aa, Artificial Sequence
  Synthetic polypeptide representing artificial human antibody VL domain
QSVLTQSPSASGTPGQRVTISCSGSSSNIGSNTVNWYQQFPGTAPKLLIFSDNQRPSGVPDRFSGSKSGTSASLAISGLQSEDEADYYCAAWDDSLSGVVFGGGTKLTVL

SEQ ID NO: 19826 - protein, 110 aa, Artificial Sequence
  Synthetic polypeptide representing artificial human antibody VL domain
QSVLTQPPSASGTPGQRVTISCSGSSSNIGSNTVNWYQQLPGTAPKLLIYSNNERPSGVPDRFSGSKSGTSASLAISGLQSEDEADYYCAAWDDSLNGWVFGGGTKLTVL

SEQ ID NO: 19827 - protein, 109 aa, Artificial Sequence
  Synthetic polypeptide representing artificial human antibody VL domain
EIVLTQSPGTLSLSPGERASLSCRASQQIIRAYLAWYQLKPGQAPRLLIYGTSYRAAGIPDRFSGAGSGTDFTLTISRLEPDDFAVYYCQLYDNSPKFTFGPGTKVDFK

SEQ ID NO: 19828 - protein, 110 aa, Artificial Sequence
  Synthetic polypeptide representing artificial human antibody VL domain
QSVLTQPPSVSAAPGQRVTISCSGGSSNIGNNYVSWYQQLPGTAPKLLIYDNDKRPSGIPDRFSASKSGTSATLGITGLQTGDEADYYCGTWDSSLSAGVFGTGTKVTVL

SEQ ID NO: 19829 - protein, 110 aa, Artificial Sequence
  Synthetic polypeptide representing artificial human antibody VL domain
QTVVTQEPSFSVSPGGTVTLTCGLSSGSVSTTYYPSWYQQTPGQAPRTLIYSTNTRSSGVPDRFSGSILGNKAALTITGAQADDESDYYCVLYMGSGIWVFGGGTKLTVL

SEQ ID NO: 19830 - protein, 112 aa, Artificial Sequence
  Synthetic polypeptide representing artificial human antibody VL domain
DVVMTQSPLSLPVTLGQPASISCRSSQSLVHSDGNTHLSWFQQRPGQSPRRLIYKVSNRDSGVPDRFSGSGSGTDFTLKISRVEAEDVGVYYCMQGTHWPWTFGQGTKLEIK

SEQ ID NO: 19831 - protein, 112 aa, Artificial Sequence
  Synthetic polypeptide representing artificial human antibody VL domain
DIVMTQSPLSLPVTPGEPASISCRSSQSLLHSNGYNYLDWYLQKPGQSPQLLIYLGSNRASGVPDRFSGSGSGTDFTLKISRVEAEDVGVYYCMQALQTLYTFGQGTKLEIK

SEQ ID NO: 19832 - protein, 111 aa, Artificial Sequence
  Synthetic polypeptide representing artificial human antibody VL domain
QSALTQPASVSGSPGQSITISCTGTSSDVGGYNYVSWYQQHPGKAPKLMIYDVSKRPSGVSNRFSGSKSGNTASLTISGLQAEDEADYYCSSYTSSSTPYVFGTGTKVTVL

SEQ ID NO: 19833 - protein, 110 aa, Artificial Sequence
  Synthetic polypeptide representing artificial human antibody VL domain
QSVLTQPPSASETPGQRVTISCSGSSSNIGSNTVNWYQLLPGTAPKLLIYSNGRRPSGVPDRFSGSKSGTSASLAISGLQSEDEADYYCAAWDDGLNGLAFGTGTKVTVL

SEQ ID NO: 19834 - protein, 112 aa, Artificial Sequence
  Synthetic polypeptide representing artificial human antibody VL domain
DIVMTQTPLSSPVTLGQPASISCRSSQSLVHSDGNTYLSWLQQRPGQPPRLLIYKISNRFSGVPDRFSGSGAGTDFTLKISRVEAEDVGVYYCTQATQFPFTFGQGTRLEIK

SEQ ID NO: 19835 - protein, 111 aa, Artificial Sequence
  Synthetic polypeptide representing artificial human antibody VL domain
QSVLTQPPSASGTPGQRVTISCSGSSSNIGSNTVNWYQQLPGTAPNLLIYSNNQRPSGVPDRFSGSKSGTSASLAISGLQSEDEADYYCAAWDDSLNGRYVFGTGTKVTVL

SEQ ID NO: 19836 - protein, 107 aa, Artificial Sequence
  Synthetic polypeptide representing artificial human antibody VL domain
DIQMTQSPSILSASLGDTVTLTCRASQSVDDWLAWYQQMPGEAPKLLIDKASFLQRGVSSRFSASGSGTDFSLTIRSLQPEDFATYFCHQYNFFPWTFGRGTKVEIK

SEQ ID NO: 19837 - protein, 109 aa, Artificial Sequence
  Synthetic polypeptide representing artificial human antibody VL domain
QSALTQPASVSGSPGQSITISCTGTNSDIGAYNYVSWYQQHPGKAPKLLISEVSHRPSGVSNRFSGSKSGNTASLTISGLQADDEADYHCSSYTSSTRVFGGGTKVTVL

SEQ ID NO: 19838 - protein, 110 aa, Artificial Sequence
  Synthetic polypeptide representing artificial human antibody VL domain
QSALTQPASVSGSPGQSITISCTGTSSDVGGYNYVSWYQQHPGKAPKLLIYEVTKRPSGVSNRFSGSKSGNTASLTISGLQAEDEADYYCSSYTSTITLVFGGGTKLTVL

SEQ ID NO: 19839 - protein, 110 aa, Artificial Sequence
  Synthetic polypeptide representing artificial human antibody VL domain
QLVLTQSPSASASLGASVKITCTLSSGHSSYAIAWHQQQPEKGPRYLMKVTSDGSHTKADGIPDRFSGSSSGAERFLTISRLQSDDEADYYCQAWGTGIVFGGGTKLTVL

SEQ ID NO: 19840 - protein, 110 aa, Artificial Sequence
  Synthetic polypeptide representing artificial human antibody VL domain
QSVLTQPPSVSGAPGQRVTISCTGSSSNIGAGYDVHWYQQLPGTAPKLLIYGNSNRPSGVPDRFSGSKSGTSASLAITGLQAEDEADYYCQSYDSSLRRVFGGGTKLTVL

SEQ ID NO: 19841 - protein, 108 aa, Artificial Sequence
  Synthetic polypeptide representing artificial human antibody VL domain
SSELTQDPAVSVALGQTVRITCQGDSLRSYYASWYQQKPGQAPVLVIYGKNNRPSGIPDRFSGSSSGNTASLTITGAQAEDEADYYCNSRDSSGNHVVFGGGTKLTVL

SEQ ID NO: 19842 - protein, 112 aa, Artificial Sequence
  Synthetic polypeptide representing artificial human antibody VL domain
QSALTQPASISGSPGQSITISCSLPGSDVETYHLVSWYQQHPVGPPKLLIFGDNKRPSGVPDRFYTSNSGRTASLVISGLQAEDEAHYFCCSYGTTPTSPYVFGSGTNVIVL

SEQ ID NO: 19843 - protein, 110 aa, Artificial Sequence
  Synthetic polypeptide representing artificial human antibody VL domain
EIVLTQSPGTLSLSPGERATLSCRASQSVRNNFLAWYQQKPGQAPRLVIYYASVRATGIPDRFSGSGAGTDFTLTISRLEPEDFAVYYCQQSGSSPPMYTFGQGTKLEIK

SEQ ID NO: 19844 - protein, 109 aa, Artificial Sequence
  Synthetic polypeptide representing artificial human antibody VL domain
EIVLTQFPGTLSLSPGERATLSCRASQTVSGGSFAWYQQNPGQAPRLLIYSPSNRATGIPDRFSGSGSGTDFTLTISRLEPEDFAVYYCHHYGSSPAWTFGQGTKVEIK

SEQ ID NO: 19845 - protein, 112 aa, Artificial Sequence
  Synthetic polypeptide representing artificial human antibody VL domain
DVVMTQSPLSLPVTLGQPASLSCRSNQSLVHSDGSTHFAWFQQRPGQSPRRLIYMASNRDSGVPDRFSGSGSGTDFTLKISRVEAEDVGVYYCMQHTHWPHTFGQGTKVEIK

SEQ ID NO: 19846 - protein, 111 aa, Artificial Sequence
  Synthetic polypeptide representing artificial human antibody VL domain
QSALTQPPSASGSPGQSVTISCTGTSSDVGGYNYVSWYQQHPGKAPKLMIYEVSKRPSGVPDRFSGSKSGNTASLTVSGLQAEDEADYYCSSYAGSNNFVVFGGGTKLTVL

SEQ ID NO: 19847 - protein, 109 aa, Artificial Sequence
  Synthetic polypeptide representing artificial human antibody VL domain
QSALTQPRSVSGPPGQSVTISCTGTSSDVGGYDYVSWYQQYPGRAPKLMIYGVSNRPSGVPYRFSGSKSGNTASLTISGLQAEDEADYYCCSYAGGPFVFGTGTEVTVL

SEQ ID NO: 19848 - protein, 105 aa, Artificial Sequence
  Synthetic polypeptide representing artificial human antibody VL domain
SYELTQPSSVSVSPGQTARIPCSGDVLAKKYARWFQQKPGQAPVLVIYKDTERPSGIPERFSGSSSGTTVTLTISGAQVDDEADYYCYSAADQGVFGGGTKLTVL

SEQ ID NO: 19849 - protein, 113 aa, Artificial Sequence
  Synthetic polypeptide representing artificial human antibody VL domain
DIVMTQSPDSLAVSLGERATINCQSSQPILYSPNNQNSLGWYQQKPGQPPKLLIYWASTRASGVPDRFSGSGSGTDFTLTISSLQAEDVAIYYCHQYRHRPSTFGQGTRLEIK

SEQ ID NO: 19850 - protein, 110 aa, Artificial Sequence
  Synthetic polypeptide representing artificial human antibody VL domain
QSVLTQPPSASGTPGQRVTISCSGSSSNIGSKIVNWYQQLPRTAPKLLIYSNNQRPSGVPDRFSGSKSGTSASLVISGLQSEDEADYYCASWDDSLNGVVFGGGTKMTVL

SEQ ID NO: 19851 - protein, 107 aa, Artificial Sequence
  Synthetic polypeptide representing artificial human antibody VL domain
DIQMTQSPSSLSASVGDRVTITCRASQGIRNNLGWYQKKPGKAPKSLIYAASSLQSGVPSRFSGSGSGTEFTLTISSLQPEDFATYYCLQLNSYPLTFGGGTKVEIK

SEQ ID NO: 19852 - protein, 107 aa, Artificial Sequence
  Synthetic polypeptide representing artificial human antibody VL domain
DIQMTQSPSSLSASVGDRVTITCRASQGINIYLAWYQQKPGKHPKLLIYAASTLQSGVPSRFSGSGSGTEFTLTISGLQPDDVATYYCQRYNLAPWTFGHGTKVDIK

SEQ ID NO: 19853 - protein, 110 aa, Artificial Sequence
  Synthetic polypeptide representing artificial human antibody VL domain
QSVLTHPPSVSAAPGQKVTISCSGNSSNIGSTYVSWYQQVPGTAPKLLIFETKKRPSGIPDRFSGSKSGTTATLDITGLQPGDEADYYCGTWDTSLHIVVFGGGTKLTVL

SEQ ID NO: 19854 - protein, 110 aa, Artificial Sequence
  Synthetic polypeptide representing artificial human antibody VL domain
QSVLTQPPSASGTPGQRVTISCSGSSSNIGSHYVYWYQQLPGTAPKLLIYRNNQRPSGVPDRFSGSKSGTSASLAISGLRSEDEADYYCAAWDDSLSGVVFGGGTKLTVL

SEQ ID NO: 19855 - protein, 111 aa, Artificial Sequence
  Synthetic polypeptide representing artificial human antibody VL domain
QLVLTQSPSASASLGASVKLTCTLSSGHSNYAIAWHQQQPEKGPRYLMKLNNDGSHSKGDGIPDRFSGSSSGAERYLTISSLQSEDEADYYCQTWDTGVWVFGGGTKLTVL

SEQ ID NO: 19856 - protein, 108 aa, Artificial Sequence
  Synthetic polypeptide representing artificial human antibody VL domain
DIQLTQSPSFLSASVGDRVTITCRASRDINTYLAWYQQKPGEAPKLLIYAASALHGGVPSRFSGSGSGTEFTLTISSLQPEDFATYYCQQLIEHPPLTFGGGSKVEIK

SEQ ID NO: 19857 - protein, 110 aa, Artificial Sequence
  Synthetic polypeptide representing artificial human antibody VL domain
QSVLTQPPSASGTPGQRVTISCSGSSSNIGSNTVNWYQQLPGTAPKLLIYSNNQRPSGVPDRFSGSKSGTSASLAISGLQSEDEADYYCAAWDDSLNGLVFGGGTRLTVL

SEQ ID NO: 19858 - protein, 107 aa, Artificial Sequence; identical to SEQ ID NO: 19291
  Synthetic polypeptide representing artificial human antibody VL domain

SEQ ID NO: 19859 - protein, 107 aa, Artificial Sequence
  Synthetic polypeptide representing artificial human antibody VL domain
DIQMTQSPSTLSASVGDRVTITCRASQSISSWLAWYQQKPGKAPKLLIYKASSLESGVPSRFSGSGSGTEFTLTISSLQPDDFATYYCQQYNSYPWTFGQGTKVEIQ

SEQ ID NO: 19860 - protein, 108 aa, Artificial Sequence [sequence omitted]

SEQ ID NO: 19861 - protein, 111 aa, Artificial Sequence
  Synthetic polypeptide representing artificial human antibody VL domain
QLVLTQSPSASASLGGSVNLTCILSSGHSSYAIAWHQQQPEKGPRYLMKLNSDGSHIKGDGIPDRFSGSSSGAERYLSISSLQSQDEADYYCQTWGSGVWVFGGGTKLTVL

SEQ ID NO: 19862 - protein, 111 aa, Artificial Sequence
  Synthetic polypeptide representing artificial human antibody VL domain
QLVLTQSPSASASLGASVKLTCTLSSGHSSYAIAWHQQQPEKGPRYLMKLNSDGSHSKGDGIPDRFSGSSSGAERYLTISSLQSEDEADYYCQTWGTGPWVFGGGTKLTVL

SEQ ID NO: 19863 - protein, 112 aa, Artificial Sequence
  Synthetic polypeptide representing artificial human antibody VL domain
DIVLTQSPLSLSVTPGQPASITCKSSQSLLHSNGKTFLYWHLQKPGQSPQLLIYELYRRFSGVSDRFIGSGSETDFTLKISRVEAGDVGVYYCMQAFLFPYTFGPGTRLEIK

SEQ ID NO: 19864 - protein, 108 aa, Artificial Sequence
  Synthetic polypeptide representing artificial human antibody VL domain
DIQMTQSPSSLSASVGDRVTITCRASQSISSYLNWYQQKPGKAPKLLIYAASSLQSGVPSRFSGSGSGTDFTLTISSLQPEDFATYYCQQSYSTPPDTFGQGTKLEIK

SEQ ID NO: 19865 - protein, 106 aa, Artificial Sequence
  Synthetic polypeptide representing artificial human antibody VL domain
DIQMTQSPSALSASVGDRVTITCRASQSIVTFLAWYQQKPGKAPKVLIYGASNLESGVPSRFTGSGSGTEFTLTISSLQPDDFATYYCQQYFHMGTFGQGTKVEVK

SEQ ID NO: 19866 - protein, 110 aa, Artificial Sequence
  Synthetic polypeptide representing artificial human antibody VL domain
QSVLTQVPSASGTPGQRVTISCSGSSSNVGRNYVYWYQQLPGAAPRLLIFMNNKRPPGVPERFSGSKSGTTASLAISGLRSDDEADYYCAAWDDSLTSLLFGGGTKLTAL

SEQ ID NO: 19867 - protein, 108 aa, Artificial Sequence
  Synthetic polypeptide representing artificial human antibody VL domain
EIVMTQSPATVSLSPGERVTLSCRASQSVSTSQLAWYQHRPGQAPRLVIFDASKRATGTPDRFSASGSGTDFTLTISRLEPEDFAVYYCQQYGSLPFAFGGGTNVEIK

SEQ ID NO: 19868 - protein, 112 aa, Artificial Sequence
  Synthetic polypeptide representing artificial human antibody VL domain
DVVMTQSPRSLPVTLGQPASISCRSSQSLVHSDGNTYLTWFQQRPGQSPRRLIYAVSNRDSGVPDRFSGSGSGTDFTLTISRVEAEDVAIYYCKQGSHGPHTFGQGTKLEIK

SEQ ID NO: 19869 - protein, 112 aa, Artificial Sequence
  Synthetic polypeptide representing artificial human antibody VL domain
DIVMTQSPLSLPVTPGEPASISCRSSQSLLHRNGHTYLDWYVQKPGQSPQLLIYLSSTRASGVPDRFSGSGSGTDFTLQISRVEAEDVGIYYCMQAVQTPWTFGQGTKVEIK

SEQ ID NO: 19870 - protein, 112 aa, Artificial Sequence
  Synthetic polypeptide representing artificial human antibody VL domain
QLVLTQSPSASASLGASVRLTCTLSSGHSNYAIAWHQQPPEKGPRFLMKVEFDGRHTKGDEIPNRFSGSTSGAERYLTISSVQPEDEAVYYCQTWASGFWGVFGGGTTLTVL

SEQ ID NO: 19871 - protein, 106 aa, Artificial Sequence
  Synthetic polypeptide representing artificial human antibody VL domain
EIALTQSPTTLYLSPGERATLSCRASQNVGNWLAWYQQRPGQAPRLLIYDVSIRAAGVPARFSGGGSGTDFSLTISSLEPEDFVVYYCVQRHWPWTFGQGSKVEVK

SEQ ID NO: 19872 - protein, 110 aa, Artificial Sequence
  Synthetic polypeptide representing artificial human antibody VL domain
QSVVTQPPSVSGTPGQKVIISCSDDRSNIRYNAVNWYQRLPGTAPKLLIYTNNRRPSGVPDRFSGSKSGTSASLAISGLRSEDEAEYYCAVWDDYLDGPVFGGGTKLTVL

SEQ ID NO: 19873 - protein, 111 aa, Artificial Sequence
  Synthetic polypeptide representing artificial human antibody VL domain
QSVLTQPPSVSGAPGQRVTISCTGTSSNIGAGYDVHWYQHLPGKAPKLIIFDNTRRPSGVPARFSGSMSGTSASLAITDLQAEDEADYFCQCFDTRLSGSVFGGGTKLTVL

SEQ ID NO: 19874 - protein, 107 aa, Artificial Sequence
  Synthetic polypeptide representing artificial human antibody VL domain
DILLTQSPSSLSASVGDRVTIACRASQTISTYLNWYQQTPGTAPKFLIYVASNLRRGAPSRFSGSGSGTNFTLTISNLQPEDFATYYCQQTYSNPRTFGQGTRLSIK

SEQ ID NO: 19875 - protein, 110 aa, Artificial Sequence
  Synthetic polypeptide representing artificial human antibody VL domain
QSALTQPASVSGSPGQSITISCNGISSDVGGYNYVSWYQQHPGKAPKLMIYDVSNRPSGVSSRFSGSKSGNTASLTISGLQAEDEADYYCASYAGGDTWVFGGGTELTVL

SEQ ID NO: 19876 - protein, 107 aa, Artificial Sequence
  Synthetic polypeptide representing artificial human antibody VL domain
EIVMMQSPATLSVSPGERASISCRASQTISTNVAWYQHKPGQAPRLLMYGSSTRATGVPPRFSGRGSGTEFSLSISSLQSEDFAVYFCQQYDNWPRTFGQGTRLEIK

SEQ ID NO: 19877 - protein, 107 aa, Artificial Sequence
  Synthetic polypeptide representing artificial human antibody VL domain
DIQMTQSPSTLSASVGDRVIITCRASKSISNSLAWYQQKSGKAPKLLIYKASSLESGVPSRFSGSGSGTEFTLTISSLQPDDFATYYCQQYNIFPYTFGQGTKLEIK

SEQ ID NO: 19878 - protein, 108 aa, Artificial Sequence
  Synthetic polypeptide representing artificial human antibody VL domain
EIVLTQSPGTLSLSPGERATLSCRASQSVSSSYLAWYQQKPGQAPRLLIYGASSRATGIPDRFSGSGSGTDFTLTISRLEPEDFAVYYCQQYGRSPVTFGPGTKVDIK

SEQ ID NO: 19879 - protein, 107 aa, Artificial Sequence
  Synthetic polypeptide representing artificial human antibody VL domain
DIQMTQSPSTLSASVGDRVTITCRASERISGWLAWYQEKPGKAPNLLIYKASTLESGVPSRFSGSGSGTEFTLTISSLQPDDFATYYCQQYNTYPITFGGGTKVEIK

SEQ ID NO: 19880 - protein, 110 aa, Artificial Sequence
  Synthetic polypeptide representing artificial human antibody VL domain
QSALTQPASVSGSPGQSITISCTGTSSDVGGYNYVSWHQQHPGTAPKVIIYDVTTRPSGVSNRFSGSKSDNTASLTISGLQAEDEADYYCLSYGGDYTYVFGSGTKVTVL

SEQ ID NO: 19881 - protein, 111 aa, Artificial Sequence
  Synthetic polypeptide representing artificial human antibody VL domain
QSVLTQPPSLSGAPGQRVTVSCTGTTSNLGAGHGVNWFQRLPERGPKLLISADNSRPSGVPDRFSVSQSGTSAFLVITGLQTDDAAEYYCQSHDDFLGGAIFGGGTTLTVL

SEQ ID NO: 19882 - protein, 111 aa, Artificial Sequence
  Synthetic polypeptide representing artificial human antibody VL domain
QSVLTQPPSVSGAPGQRVTISCTGGSSNIGAGYVVHWYQQLPGAAPKVLIYDTIYRPSGVPDRFSGSKSGASASLAITGLRAEDECHYYCQSYDSSLFGGVFGGGTKVTVL

SEQ ID NO: 19883 - protein, 111 aa, Artificial Sequence
  Synthetic polypeptide representing artificial human antibody VL domain
QSALIQVASVSGSPGQSITISCTAPTSDVNFYKYVSWFQQHPGKVPKLLLYDVGHRPSGVSDRFSGSKSGDTASLTISRLQPEDEGDYYCSSAPTKIALEVFGGGTKLTVL

SEQ ID NO: 19884 - protein, 110 aa, Artificial Sequence
  Synthetic polypeptide representing artificial human antibody VL domain
NFMLTQPHSVSESPGKTVTISCTGSSGSIADNYVQWYQQRPGSAPTTVIYEDKQRPSGVPDRFSGSIDSSSNSASLTISGLKTEDEADYYCQSYDGNNWVFGGGTKLTVL

SEQ ID NO: 19885 - protein, 107 aa, Artificial Sequence
  Synthetic polypeptide representing artificial human antibody VL domain
EIVMTQSPATLSVSPGERATLSCRASQSVARNLAWYQQKPGQAPRLLISDTSTRATGIPARFSGSGTGTEFTLTINSLQSEDFAFYYCQHYNKWPYTFGQGTKVEIK

SEQ ID NO: 19886 - protein, 110 aa, Artificial Sequence
  Synthetic polypeptide representing artificial human antibody VL domain
QSALTQPASVSGSPGQSITISCTGTSSDVGSYNLVSWYHQHPGKVPKLIIYEGTKRPSGVSDRFSGSRSGNTASLTISGLQAEDEGEYYCCSFAGSSTYVFGTGTKVTVL

SEQ ID NO: 19887 - protein, 107 aa, Artificial Sequence
  Synthetic polypeptide representing artificial human antibody VL domain
EIVMTQSPATLSMSPGERATLSCRASQSVSSNLAWYQQKPGQAPRLLIYDASTRATGIPARFSGSGSGTEFTLTISSLQSEDFAVYYCQQYNNWPYTFGQGTKLEIK

SEQ ID NO: 19888 - protein, 107 aa, Artificial Sequence
  Synthetic polypeptide representing artificial human antibody VL domain
DIQMTQSPSSVSASVGERVTIACRASQYIAGSLAWYQQKPGKAPELLIYGASSLQSGVPSRFSGSGSGTDFTLTISSLQPEDFATYYCQQASGFPYTFGQGTKLEIK

SEQ ID NO: 19889 - protein, 107 aa, Artificial Sequence
  Synthetic polypeptide representing artificial human antibody VL domain
EIVMTQSPATLSVSPGERATLSCRASQSVISNLAWYQYIPGQVPRLLIYGASTRATGIPVRFSGSGSGTEFTLTISSLQSEDFGVYFCQHYLKWPYTFGQGTNLEIK

SEQ ID NO: 19890 - protein, 107 aa, Artificial Sequence
  Synthetic polypeptide representing artificial human antibody VL domain
DIQLTQSPSTLSASVGDRVTITCRASQSFTSWLAWYQQKPGKAPKLLIYKASTLESGVPSRFSGSGSGTDFSLTISGLQPDDFATYYCQQYDSYPLTFGGGTTVQIK

SEQ ID NO: 19891 - protein, 108 aa, Artificial Sequence
  Synthetic polypeptide representing artificial human antibody VL domain
EIVLTQSPGTLSLSPGERATLSCRASQSVSSSYLAWYQQKPGQAPRLLIYGASSRATGIPDRFSGSGSGTDFTLTISRLEPEDFAVYYCQQYGSSPRTFGQGTKLEIK

SEQ ID NO: 19892 - protein, 108 aa, Artificial Sequence
  Synthetic polypeptide representing artificial human antibody VL domain
EIVLTQSPGTLSLSPGERATLSCRASQSVSSSYLAWYQQKPGQAPRLLIYGASSRATGVPDRFSGSGSGTDFTLTISRLEPEDFAVYFCQQYGSSPGTFGQGTKVEFK

SEQ ID NO: 19893 - protein, 113 aa, Artificial Sequence
  Synthetic polypeptide representing artificial human antibody VL domain
DIVMTQSPDSLAVSLGERATINCKSSQSILYSSNDKNYLAWYQQKPGQPPKLLIYWASTRVSGVPDRFSGSGSGTDFTLTISSLQAEDVAVYYCQQYYSSPQTFGQGTKLEIK

SEQ ID NO: 19894 - protein, 108 aa, Artificial Sequence; identical to SEQ ID NO: 19097
  Synthetic polypeptide representing artificial human antibody VL domain

SEQ ID NO: 19895 - protein, 110 aa, Artificial Sequence
  Synthetic polypeptide representing artificial human antibody VL domain
QSVLTQPPSASGTPGQRVTISCSGGSSNIGDNFVYWYQQLPGTAPKLLIYRNIQRPSGVPDRFSGSKSGTSASLAISGLRSEDEADYYCSAWDDSLSVVLFGGGTKLTVL

SEQ ID NO: 19896 - protein, 112 aa, Artificial Sequence
  Synthetic polypeptide representing artificial human antibody VL domain
DVVMTQSPVSLPVTLGQPASISCRSSQSLVFSNGNTYLSWFHQRPGQSPRQLIYEVSDRDSGVPDRFSGSGSGTDFTLKISRVEAEDVGVYYCMQGTHWPYTFGLGTRLEIK

SEQ ID NO: 19897 - protein, 113 aa, Artificial Sequence
  Synthetic polypeptide representing artificial human antibody VL domain
DIVMTQSPDSLAVSLGERATINCTSSQSLLSSYSNKNYLVWYQQRPGQSPRLLISWASMRQSGVPDRFSGSGSGTDFTLTISSLQAEDVAVYYCQQCYGSPLTFGGGTKVEIK

SEQ ID NO: 19898 - protein, 111 aa, Artificial Sequence
  Synthetic polypeptide representing artificial human antibody VL domain
QSALTQPPSASGSPGQSVTISCTGTSSDVGGYNYVSWYQQHPGKAPKLMIYEVTKRPSGVPDRFSGSKSGNTASLTVSGLQAEDEGDYFCSSYGGRNNFWVLGGGTKLTVL

SEQ ID NO: 19899 - protein, 107 aa, Artificial Sequence
  Synthetic polypeptide representing artificial human antibody VL domain
EIVLTQSPEFQSVTPKERVSITCRASQNINIDLHWYQQKPNQSPKLLIKYASHSNSGVPSRFSGSGSGTDFTLTIWSLEPEDAATYYCHQSIHLPYTFGQGTKLEIK

SEQ ID NO: 19900 - protein, 107 aa, Artificial Sequence
  Synthetic polypeptide representing artificial human antibody VL domain
DIQMTQSPSTLSASVGDRVTITCRASQSISTLLAWYQQKPGKAPNLLIYKASSLESGVPSRFSGSGSGTEFTLTISSLQPDDFATYYCQQYNSFAYTFGQGTKLEIK

SEQ ID NO: 19901 - protein, 107 aa, Artificial Sequence
  Synthetic polypeptide representing artificial human antibody VL domain
DIQMTQSPSSLSASVGDRVTITCRASQGISNYLAWYQQKPGKVPNLLIYAASTLQSGVPSRFSGSGSGTDFTLTISSLQPEDVATYYCQKYNSAPWTFGQGTKVEIK

SEQ ID NO: 19902 - protein, 108 aa, Artificial Sequence
  Synthetic polypeptide representing artificial human antibody VL domain
EIVLTQSPDTLSLSPGETATLSCRASESVGRYLAWYQQKPGQAPRLLIHDASSGATGVPARFSGSGSGTDFNLTISRLEPEDFAVYFCQQRSNWPSITFGQGTRVEIK

SEQ ID NO: 19903 - protein, 110 aa, Artificial Sequence
  Synthetic polypeptide representing artificial human antibody VL domain
QSAPTQPASVSGSPGQSITISCTGSSSDVGGYKYVSWYQQHPHKAPKLMIYDVNNRPSGVSTRFSGSKSGNTASLTISGLQAEDEADYYCISFTSSGTYVFGPGTRVTVL

SEQ ID NO: 19904 - protein, 110 aa, Artificial Sequence
  Synthetic polypeptide representing artificial human antibody VL domain
QSALTQPASVSGSPGQSITFSCAGTSSDVGRYDRVSWYQQHPGKAPKLMIYEVNKRPSGVSNRFSGFKSGSAASLTISGLQTEDEADYFCCSYAGSMTWVFGGGTKVTVL

SEQ ID NO: 19905 - protein, 106 aa, Artificial Sequence
  Synthetic polypeptide representing artificial human antibody VL domain
DIQMTQSPPTLSAYVGDRVTITCRASQDTDNRVAWYQHKPGKAPKLLIYKVSSLEDGIPSRFSGSGSATEFTLTISGLQPDDFATYYCQHYSSLYTFGQGTELEIK

SEQ ID NO: 19906 - protein, 111 aa, Artificial Sequence
  Synthetic polypeptide representing artificial human antibody VL domain
QSALTQPPSASGSPGQSVTISCTTTSSDFGGYNLVSWYQQRPGKAPKLMIYEVSKRPSGVPDRFSGSKSGNTASLTVSGLQAEDEADYYCSSYGGSNIFYVFGTGTKVTVL

SEQ ID NO: 19907 - protein, 107 aa, Artificial Sequence
  Synthetic polypeptide representing artificial human antibody VL domain
AIQMTQSPSSLSASVGDRVTITCRASQYIRNDVAWYQQKPGKAPNLLIYAASNLEGGVPSRYSGSGSGTDFTLTISSLQPEDFATYYCKQDYNYPHTFGGGTKVEIK

SEQ ID NO: 19908 - protein, 112 aa, Artificial Sequence
  Synthetic polypeptide representing artificial human antibody VL domain
QSALTQPASVSGSPGQSITISCTGTSSAVGGYKYVSWYQQHPGKAPRLLIHDVNHRPTGVSDRFSGSKSDDAASLTISGLLAEDEAVYICCSYTTIPDHTWVFGGGTNLTVL

SEQ ID NO: 19909 - protein, 111 aa, Artificial Sequence
  Synthetic polypeptide representing artificial human antibody VL domain
QSLLTQPPSVSGAPGQRVTISCAGSSSNIGAGYDVHWYQQLPGTAPKLLIYVNNNRPSGVPDRFSGSRSGTSASLAITGVQAEDEADYYCQSHDSSLSIWVFGGGTKLTVL

SEQ ID NO: 19910 - protein, 110 aa, Artificial Sequence
  Synthetic polypeptide representing artificial human antibody VL domain
NFMLTQPHSVSASPGKTVTISCTGNSGSIASNFVQWYQQRPGSAPIIVIYEDNQRPSGVPNRFSGSIDSSSNSASLTISGLKTEDEADYYCQSYDNNNWVFGGGTRLTVL

SEQ ID NO: 19911 - protein, 107 aa, Artificial Sequence
  Synthetic polypeptide representing artificial human antibody VL domain
DIQMTQSPSSLSASVGDRVTITCRASQGIRNYLTWFQQKPGKPPKSLIYAASSLQPGVPSKFSGSGSGTDFTLTISGLQPEDFATYYCQQYASYPMTFGQGTRLEIK

SEQ ID NO: 19912 - protein, 107 aa, Artificial Sequence
  Synthetic polypeptide representing artificial human antibody VL domain
EIVLTQSPATLSLSPGERATLSCRASQSVSNSLAWYQQKPGQAPRLLISDASNRATGIPARFSGSGSGTDFTLTISSLEPEDFAVYYCQQRGTWPYTFGQGTKLEIK

SEQ ID NO: 19913 - protein, 111 aa, Artificial Sequence
  Synthetic polypeptide representing artificial human antibody VL domain
QSVLTQPPSVSGAPGQRVTISCTGSSSDIGAGYDVNWYQQLPGTAPKLLIHDNSNRPSGVPDRFSGSKSGTSASLAITGLQAEDEADYYCQSYDSGLSVYVFGTGTKVTVL

SEQ ID NO: 19914 - protein, 107 aa, Artificial Sequence
  Synthetic polypeptide representing artificial human antibody VL domain
DIQMTQSPSTLSAFVGDRVTITCRASQSISNWLAWYQQKPGKAPKLLIYKASTLESGVPSRFSGSESGTEFTLTISSLQPDDFATYFCQQFSLYPITFGGGTKVEIK

SEQ ID NO: 19915 - protein, 107 aa, Artificial Sequence
  Synthetic polypeptide representing artificial human antibody VL domain
DIQMTQSPSSVSASVGDRVTITCRASQGISSWLAWHQQKPGKAPKLLIFAASSLQSGVPSRFSGSGSGTDFTLTISNLQPEDFATYYCQQANSFPITFGQGTRLEIK

SEQ ID NO: 19916 - protein, 108 aa, Artificial Sequence
  Synthetic polypeptide representing artificial human antibody VL domain
EIVLTQSPGTLSLSPGERATLSCRASHSIRYTYLAWYQQKPGQAPRLLMFGASSRATATPGRFTGSGSGTDFNLTISRLEPEDFGVYYCQQYGSSPYTFGQGTKVEIK

SEQ ID NO: 19917 - protein, 107 aa, Artificial Sequence
  Synthetic polypeptide representing artificial human antibody VL domain
DIQLTQSPSSVSASVGDRVTITCRASQDISRWLAWYQQKPGKAPKLLIYAASSLESGVPSRFSGSGSGTDFTLTISCLQFEDFATYFCQQAYSFPVTFGQGTRLEIK

SEQ ID NO: 19918 - protein, 107 aa, Artificial Sequence
  Synthetic polypeptide representing artificial human antibody VL domain
EIVLTQSPVTLSLSPGERATLSCRASHSVGVYLAWYQQKPGQVPRLLIYDSTHRATGISPRFSGSGSGTDFTLTISSLEPEDSSVYYCQQRSSWPLTFGGGTKVEIK

SEQ ID NO: 19919 - protein, 107 aa, Artificial Sequence
  Synthetic polypeptide representing artificial human antibody VL domain
EIVMTQSPATLSVSPGGRATLSCGASQSVGINLAWYLQKPGQAPRLLIFGASTRATGVPLRFSGSGSGTEFTLTISSLQSEDFAVYFCQQYDKWPPSFGPGTKVDVK

SEQ ID NO: 19920 - protein, 108 aa, Artificial Sequence
  Synthetic polypeptide representing artificial human antibody VL domain
EIVLTQSPGTLSLSPGERATLSCRASQSVSSSQLAWYQQKPGQAPRLLIYGASSRATGIPDRFSGSGSGTDFTLTISRLEPEDFAVYYCQQYGSSPLTFGGGTKVEIK

SEQ ID NO: 19921 - protein, 111 aa, Artificial Sequence
  Synthetic polypeptide representing artificial human antibody VL domain
QSVLTQPPSVSGAPGQRVTISCTGSSSNIGAGYDVHWYQHFPGAAPKLLIYANDNRPSGVPDRFSGSQSGTSASLAITGLQAEDETDYYCQSYDISLSGYVFGSGTKVTVL

SEQ ID NO: 19922 - protein, 112 aa, Artificial Sequence
  Synthetic polypeptide representing artificial human antibody VL domain
QPVVTQSSSVSASLGSSVNLTCTLSYDHRAFIIAWHQQEPGKAPRFLMRLDGRGVYRKASGLPDRFSGFSSGSHRYLTISRLQSDDEAHYYCETWDTDSRGVFGGGTRLTVL

SEQ ID NO: 19923 - protein, 106 aa, Artificial Sequence; identical to SEQ ID NO: 19542
  Synthetic polypeptide representing artificial human antibody VL domain

SEQ ID NO: 19924 - protein, 110 aa, Artificial Sequence
  Synthetic polypeptide representing artificial human antibody VL domain
QTVVTQEPSFSVSPGGTVTLTCGLSSGSVSSSHYPSWYQQTPGQAPRTLIHSTNTRSSGVPDRFSGSILGNKAALTITGAQADDESDYYCVLYMTSGNWVFGGGTKLTVL

SEQ ID NO: 19925 - protein, 105 aa, Artificial Sequence
  Synthetic polypeptide representing artificial human antibody VL domain
SYELTQPPSVSVSPGQTASITCSGDKLGDKHVCWYQQKPGQSPLLVIYQDAKRPSGIPERFSGSNSGNTATLTISGTQAVDEADYYCQAWDSTVVFGGGTKLTVL

SEQ ID NO: 19926 - protein, 107 aa, Artificial Sequence
  Synthetic polypeptide representing artificial human antibody VL domain
DIQLTQSPSFLSASVGDRVTITCRASQGISSYLAWYQQKPGKAPKLLIYAASTLQSGVPSRFSGSGSGTEFTLTISSLQPEDFATYYCQQLNSYPFTFGQGTRLEIK

SEQ ID NO: 19927 - protein, 111 aa, Artificial Sequence
  Synthetic polypeptide representing artificial human antibody VL domain
QLFLTQSPSASASLGASVKLTCTLTSGHSRYAIAWLQQQPEKRPRFLMKLNNDGHHIKGAGIPDRFSGSSSGAERYLTISSLQSEDEAVYYCQTWASGIRVFGGGTWVTVL

SEQ ID NO: 19928 - protein, 111 aa, Artificial Sequence
  Synthetic polypeptide representing artificial human antibody VL domain
QLSLTQSPSDSASLGASVKLTCTLSSGHSRYAVAWHQQQPEKRPRFLMKLNNDGHHIKGAGIPDRFSGSSSGAERYLTISSLQSEDEAVYYCQTWGSGIRVFGGGTKVTVL

SEQ ID NO: 19929 - protein, 107 aa, Artificial Sequence
  Synthetic polypeptide representing artificial human antibody VL domain
DIQMTQSPQTLAASLGDRVTITCRASQSVSNWLAWYQQKPGKAPRLLIYKASNLESGVPSRFSGSGSGTEFTLTIRSLQPDDIATYHCQQYDTYPVTFGGGTRVEIK

SEQ ID NO: 19930 - protein, 107 aa, Artificial Sequence
  Synthetic polypeptide representing artificial human antibody VL domain
EIVLTQSPATLSLSPGERAILSCRASQSVDNYLGWYQHKPGQAPRLLIYGATNRAPAIAARFSGAGSGTDFTLTISSLEPEDFAVYYCQQRHSWPLTFGPGTKVDIK

SEQ ID NO: 19931 - protein, 107 aa, Artificial Sequence
  Synthetic polypeptide representing artificial human antibody VL domain
DIQLTQSPPFLSASVGDKITITCRASQGISTYLAWYQQKPGKAPKLLIYVASTLESGVPLRFSGSGSGTEFTLTISSLQPEDFATYYCQHLKSYPFAFGPGTRVDVK

SEQ ID NO: 19932 - protein, 113 aa, Artificial Sequence
  Synthetic polypeptide representing artificial human antibody VL domain
DIVMTQSPDSLAVSLGERATINCKSSQSILYSSNNKNYLGWYQQKPGQPPKLLIYWASTRDSGVPDRFSGSGSGTDFTLTISSLQAEDVAIYYCQQYYSTPYTFGQGTKLEIK

SEQ ID NO: 19933 - protein, 106 aa, Artificial Sequence
  Synthetic polypeptide representing artificial human antibody VL domain
DIQMTQSPSSLSASVGDRVTITCRASQSISSYLNWYQQKPGKAPKLLIYAASSLQSGVPSRFSGSGSGTDFTLTISSLQPEDFATYYCQQSYSTPNFGPGTKVDIK

SEQ ID NO: 19934 - protein, 112 aa, Artificial Sequence
  Synthetic polypeptide representing artificial human antibody VL domain
QLVLTQSPSVSASLGASVRLTCTLTNGHDFYAVAWHQQRPGKGPRYLMKINTDGSHSRGAGIPDRFSVSSSGSEHYLTVSSLQSEDEGDYYCQTWANWNTWIFGGGTKLTVL

SEQ ID NO: 19935 - protein, 107 aa, Artificial Sequence
  Synthetic polypeptide representing artificial human antibody VL domain
AIQMTQSPSSLSASVGDRVTITCRASQDIRSDLGWYQQRPGEAPKLLIYAASTLQTGVPSRFSGSGSGRYFSLTISSLQPEDFATYYCLQDCEYPLTFGGGTKVEIK

SEQ ID NO: 19936 - protein, 111 aa, Artificial Sequence
  Synthetic polypeptide representing artificial human antibody VL domain
QLVLTQSPSASASLGGSVKLTCTLNSGRTRYAIAWLQQQPEKGPRFLMKLNNDGHHVTGDGIPDRFSGSSSGAERYLTISSLQAEDEADYYCLTWGAGFRVFGGGTRLTVL

SEQ ID NO: 19937 - protein, 106 aa, Artificial Sequence
  Synthetic polypeptide representing artificial human antibody VL domain
EIVLTQSPATLSLSPGERATLSCRASQSVSSYLAWYQQKPGQAPRLLIYDASNRATGIPARFSGSGSGTDFTLTISSLEPEDFGVYFCQQRVSWPTFGPGTKVDIK

SEQ ID NO: 19938 - protein, 107 aa, Artificial Sequence
  Synthetic polypeptide representing artificial human antibody VL domain
EIVMTQSPATLSVSPGERATLSCRASQSVSSKLAWYQQKPGQAPRLLISGASTRATGIPGTFSGSGSGTEFTLTISSLQSEDFAVYYCQQYNGWPYTFGQGTKLEIK

SEQ ID NO: 19939 - protein, 111 aa, Artificial Sequence
  Synthetic polypeptide representing artificial human antibody VL domain
QLVLTQSPAASASLGASVKLTCTLSSGHSGYDIAWHQQQPGKGPRFLMKVTHYNTHIKGDDIPDRFSGSSSGAERYLTISSLRSEDEADYYCQTWDTGIRVFGGGTKVTVL

SEQ ID NO: 19940 - protein, 108 aa, Artificial Sequence
  Synthetic polypeptide representing artificial human antibody VL domain
SYVLTQPPSVSVAPGKTAKITCGGNNIGNKDVHWYQQKPGQAPVVVFYYDGDRPSVIPERFSASNSGNTATLTISGVEAGDEADYYCQVWDSNNDHQVFGGGTKLTVL

SEQ ID NO: 19941 - protein, 110 aa, Artificial Sequence
  Synthetic polypeptide representing artificial human antibody VL domain
QSALTQPPSASGTPGQRVTISCSGGTSKIGRNHVYWYQQLPGTAPKLLIYKTIQRPSGVPDRFSGSRSDTSASLAISGLRSEDEAHYHCATWDDSLSRPVFGGGTRLTVL

SEQ ID NO: 19942 - protein, 113 aa, Artificial Sequence
  Synthetic polypeptide representing artificial human antibody VL domain
DIVMTQSPDSLAVSLGERATINCKSSQSVLYSSNNKNYLAWYQQKPGQPPKLLIYWASTRESGVPDRFSGSGSGTDFTLTISSLQAEDVAVYYCQQYYSTPITFGQGTRLEIK

SEQ ID NO: 19943 - protein, 107 aa, Artificial Sequence
  Synthetic polypeptide representing artificial human antibody VL domain
EIVMTQSPATLSVSPGERATLSCRASQSISSTLAWYQQKPGQAPRLLIYGASARAPGIPARFSGSGSGTEFTLTISSLQSEDFAIYYCQQYKNWPQTFGQGTKVEIK

SEQ ID NO: 19944 - protein, 111 aa, Artificial Sequence
  Synthetic polypeptide representing artificial human antibody VL domain
DVVMTQSPLSLPVTLGQPASISCRSSQSLVYRDGDTYLNWFQQRPGQSPRRLIYKVSNRDSGVPDRFSGSGSGTDFTLKISRVEAEDVGVYYCMQGTHWRTFGQGTKLEIK

SEQ ID NO: 19945 - protein, 108 aa, Artificial Sequence; identical to SEQ ID NO: 19011
  Synthetic polypeptide representing artificial human antibody VL domain

SEQ ID NO: 19946 - protein, 108 aa, Artificial Sequence
  Synthetic polypeptide representing artificial human antibody VL domain
EIVLTQSPGTLSLSPGERATLSCRASQSVSSNYLAWYQQKPGQAPRLLIYGASSRATGIPDRFSGSGSGTDFTLTISRLEPEDFAVYYCQQYGSSPRTFGQGTKVEIK

SEQ ID NO: 19947 - protein, 107 aa, Artificial Sequence
  Synthetic polypeptide representing artificial human antibody VL domain
DIQMTQSPSSLSASVGDRVTITCRASQSISNNLNWYHQKPGKAPKLLIYAASSLQGGVPSRFSGSGSGTDFTLTISSLQPEDFATYYCQQSYSTPRTFGQGTKLEIK

SEQ ID NO: 19948 - protein, 110 aa, Artificial Sequence; identical to SEQ ID NO: 19170
  Synthetic polypeptide representing artificial human antibody VL domain

SEQ ID NO: 19949 - protein, 112 aa, Artificial Sequence
  Synthetic polypeptide representing artificial human antibody VL domain
DIVMTQSPLSLPVIPGEPASISCRSSQSLLHSNGYNYLDWYLQKPGQSPQVLIYLGSNRASGVPDRFSGSGSGTDFTLKISRVEAEDVGVYYCMQALQTPWTFGQGTKVEIK

SEQ ID NO: 19950 - protein, 108 aa, Artificial Sequence
  Synthetic polypeptide representing artificial human antibody VL domain
EIVMTQSPATLSVSPGEGATLSCRAGQSVNSNLAWYQQKPGQAPRLLIYGASTRATGIPARFSGSGFGTEFTLTINSLQSEDFAVYYCQQYNHWPLITFGQGTRLEIK

SEQ ID NO: 19951 - protein, 113 aa, Artificial Sequence
  Synthetic polypeptide representing artificial human antibody VL domain
DIVMTQSPDSLAVSLGEGATISCKSSQNVFFQSNNKNYLAWYQQKPRQPPKLLIYSASTRASGVPDRFSGSGSGTDFTLTISSLQPEDVAVYYCQQYYATPPTFGQGTKVEIK

SEQ ID NO: 19952 - protein, 110 aa, Artificial Sequence
  Synthetic polypeptide representing artificial human antibody VL domain
QAGLTQPPSVSQGLRQTATLTCTGNNNNVGNQGAAWLQQRQGHPPKLLSYRNNNRPPEISERFSASRSGNTVSLTITGLQPEDEADYYCSAWDSTLSVWVFGGGTKLTVL

SEQ ID NO: 19953 - protein, 110 aa, Artificial Sequence
  Synthetic polypeptide representing artificial human antibody VL domain
QSVLTQPPSVSAAPGQKVTISCSGISSSIGNNYVSWYQQLPGTAPKLLIYDNDQRPSDIPDRFSGSRSGTSATLGISGLQTGDEADYYCATWDTSLSSGWFGGGTRVTVL

SEQ ID NO: 19954 - protein, 106 aa, Artificial Sequence
  Synthetic polypeptide representing artificial human antibody VL domain
SYELTQPSSVSVSPGQTARITCSGDVLAKKYARWFQQKPGQAPVLVIYKDSERPSGIPERFSGSSSGTTVTLTISGAQVEDEADYYCYSAADNNRVFGGGTKLTVL

SEQ ID NO: 19955 - protein, 107 aa, Artificial Sequence; identical to SEQ ID NO: 19149
  Synthetic polypeptide representing artificial human antibody VL domain

SEQ ID NO: 19956 - protein, 108 aa, Artificial Sequence
  Synthetic polypeptide representing artificial human antibody VL domain
EIVMTQFPATLSVSPGEGATLSCRADQSVRSNLAWYQHKPGQAPSLLIYDASIRASGVPARFSGRGSGTEFTLSISSLQSEDSAVYYCQQYDNWPPVTFGQGTRVEIK

SEQ ID NO: 19957 - protein, 113 aa, Artificial Sequence
  Synthetic polypeptide representing artificial human antibody VL domain
DIVLTQSPDSLAVSLGERATINCKSSHSLFYTSENTNYLAWYQQKPGQPPNMIISWASARESGVPDRFTGSGSGTDFTLTITSLQPEDVAVYYCQQFYATPPTFGQGTKLQIK

SEQ ID NO: 19958 - protein, 109 aa, Artificial Sequence
  Synthetic polypeptide representing artificial human antibody VL domain
SYVLTQPPSVSVAPGKTARITCGGNNIGSKSVHWYQQKPGQAPVLVVYDDSDRPSGIPERFSGSNSGNTATLTISRVEAGDEADYYCQVWDSSSDHHVVFGGGTKLTVL

SEQ ID NO: 19959 - protein, 106 aa, Artificial Sequence
  Synthetic polypeptide representing artificial human antibody VL domain
DIQMTQSPSTLSASVGDRVTITCRASQSISSWLAWYQQKPGKAPNLLIYKASSLESGVPSRFSGSGSGTEFTLTINSLQPDDFATYYCQQYNSYWTFGQGTKVEIK

SEQ ID NO: 19960 - protein, 107 aa, Artificial Sequence
  Synthetic polypeptide representing artificial human antibody VL domain
DIQMTQSPSTVSASVGDTVTITCRASQDISSWLAWYQVKPETAPKSLIYGAFGLQRGVPSRFSGSGSGAEFTLTITSLQPEDFATYYCQQYSTYPLTFGGGTKVELK

SEQ ID NO: 19961 - protein, 111 aa, Artificial Sequence
  Synthetic polypeptide representing artificial human antibody VL domain
QSVLTQPPSVSGAPGQTVTISCTGGSSNLGEGYDVHWYQQLPGTAPKLIIYASRDRPSGVPDRFSGSKSGTSASLAITGLQTEDEADYYCQSYDIVRDQMVFGGGTALTVL

SEQ ID NO: 19962 - protein, 110 aa, Artificial Sequence
  Synthetic polypeptide representing artificial human antibody VL domain
QSALTQPASVSGSPGQSITISCTGTSSDVGGYNYVSWYQHLPGKAPKLMIYDVSNRPSGVSNRFSGSKSGNTASLTISGLQAGDEADYYCSSYTTSTTYVFGTGTRVTVL

SEQ ID NO: 19963 - protein, 110 aa, Artificial Sequence
  Synthetic polypeptide representing artificial human antibody VL domain
QAVVTQEPSLTVSPGGTVTLTCGSTTGDVTIGHYPYWFQQKPGQVPRALIYDTNIRYSWTPARFSGSLLGGKAALTLSSAQPEDEADYYCLLYCGDSQQVFGGGTKLTVL

SEQ ID NO: 19964 - protein, 110 aa, Artificial Sequence
  Synthetic polypeptide representing artificial human antibody VL domain
QSVLTQPPSVSGAPGQRVTISCTGSSSNIGAGYDIHWYQQLPGTAPKLLIYGDTNRPSGVPDRFSGSKSGTSASLAISGLQAEDEADYYCQSYDSSLNALFGGGTKLTVL

SEQ ID NO: 19965 - protein, 111 aa, Artificial Sequence
  Synthetic polypeptide representing artificial human antibody VL domain
QSVLTQPPSVSGAPGQRVTVSCTGHSSNIGGGYDVHWYQQLPGTAPRLLIFGNSNRPSGVPDRFVGSKSGASASLAIAGLQEEDEADYYCQSYDAGLSAVVFGGGTKVTVL

SEQ ID NO: 19966 - protein, 110 aa, Artificial Sequence
  Synthetic polypeptide representing artificial human antibody VL domain
QTVVTQEPSFSVSPGGTVTLTCGLSSGSVSTSYYPSWYQQTPGQAPRTLMYSTNTRSSGVPDRFSGSILGNKAALTITGAQADDESDYYCVLYMGSGIWVFGGGTKLTVL

SEQ ID NO: 19967 - protein, 107 aa, Artificial Sequence
  Synthetic polypeptide representing artificial human antibody VL domain
SYEVTQPASVSVSPGQTATITCSGQKLEDKYVCWYQQKPGQSPVLVIYEDKKRPSGIPERFSGSNTGNTATLTISGTQAMDAADYYCQVWDTNTLRVFGGGTRLTVL

SEQ ID NO: 19968 - protein, 111 aa, Artificial Sequence
  Synthetic polypeptide representing artificial human antibody VL domain
QLLLTQSPSASASLGASVKLTCTLSSGHSRYAIAWHQQQAEKRPRFLMKLNNDGHHIKGAGIPDRFSGSSSGAERYLTISSLQSEDEAVYYCQTWGSGIRVFGGGTKVTVL

SEQ ID NO: 19969 - protein, 107 aa, Artificial Sequence
  Synthetic polypeptide representing artificial human antibody VL domain
DIQMSQSPSSLSASVGDRVTITCRASQNIAVYVNWYQQKPRKAPQLLVYAASNLQTGVPSRFTGSGSGTDFALTITSLQPDDVAAYYCQQSYSTPYTFGQGTKLEIK

SEQ ID NO: 19970 - protein, 107 aa, Artificial Sequence
  Synthetic polypeptide representing artificial human antibody VL domain
SYDLTQPPSVSVSPGQTARITCSGDALPKQYAYWYQQKPGQAPVLVIYKDTKRPSGIPERFSGSSSGTTVTLTISGVQAEDEADYYCQSGDSSVTYVFGTGTKVTVL

SEQ ID NO: 19971 - protein, 108 aa, Artificial Sequence
  Synthetic polypeptide representing artificial human antibody VL domain
EIVLTQSPATMSLSPGDRATLSCEASETIDRGFLAWYQHKSGLAPRLLIYDATNTASGIPDRFTGSGSGTDFTLTISRLEPDDFAVYYCQQYGTSPITFGPGTRVEIK

SEQ ID NO: 19972 - protein, 109 aa, Artificial Sequence
  Synthetic polypeptide representing artificial human antibody VL domain
QAVVTQDPALTVSPGGTVTLACASSTGSVTRWRYPYWFQQKPGQAPTTLIYDTDNKKSWIPARFSGSLIGGKAALTLSGAQPEDEADYFCSLWYDGVRVFGGGTKLTVL

SEQ ID NO: 19973 - protein, 108 aa, Artificial Sequence
  Synthetic polypeptide representing artificial human antibody VL domain
EIVLTQSPGTLSLSPGERATLSCRASQSVSSSYLAWYQQNPGQAPRLLIYGASSRAIGIPDRFSGSGSGTDFTLTISRLEPEDFAVYYCQQYGSSSITFGQGTRLEIK

SEQ ID NO: 19974 - protein, 107 aa, Artificial Sequence
  Synthetic polypeptide representing artificial human antibody VL domain
DIQMTQSPSTLSASVGDRVTITCRASQSISSWLAWYQQKPGKAPKLLIYKASSLESGVPSRFSGSGSGTEFTLTISSLQPDDFATYYCQQYNSYPLTFGGGTKVEIK

SEQ ID NO: 19975 - protein, 113 aa, Artificial Sequence
  Synthetic polypeptide representing artificial human antibody VL domain
DIVMTQSPDSLAVSLGERATINCKSSQSVLYSSNNKNYLAWYQQKPGQPPKLLIYWASTRESGVPDRFSGSGSGTDFTLTISSLQAEDVAVYYCQQYYSTPRTFGQGTKLEIK

SEQ ID NO: 19976 - protein, 111 aa, Artificial Sequence
  Synthetic polypeptide representing artificial human antibody VL domain
QSVLTQPPSASGTPGQRVTISCSGSSSNIGSNYVYWYQQLPGTAPKLLIYSNNQRPSGVPDRFSGSKSGTSASLAISGLRSEDEADYYCAAWDDSLSALYVFGTGTKVTVL

SEQ ID NO: 19977 - protein, 107 aa, Artificial Sequence
  Synthetic polypeptide representing artificial human antibody VL domain
DIQVTQSPSSLSASVGDRVTITCRASRNINSYLNWFQQKPGKAPKLLIYAGSSLISGVPSRFSGSGSGTDFTLTIGSLQPEDSATYYCQQIYSTLRTFGQGTKVEIK

SEQ ID NO: 19978 - protein, 109 aa, Artificial Sequence
  Synthetic polypeptide representing artificial human antibody VL domain
SYVLTQPPSASVAPGQTARLTCGAVGIGAKRVQWYQQRPGQAPHLVVFDDSDRPSGIPERFTGSKSGNTATLTITRVEAGDEADYYCQVWDSTTDHNVVFGGGTKLAVL

SEQ ID NO: 19979 - protein, 111 aa, Artificial Sequence
  Synthetic polypeptide representing artificial human antibody VL domain
QSILTQPPSVSGAPGQKVTISCTGSSSNIGSNYDVNWYQLLPGRAPKLLIYRDVSRPSGVPDRFSGSKSGTSASLAITGLQAEDEADYYCQSYDISLRGSVFGGGTKLTVL

SEQ ID NO: 19980 - protein, 107 aa, Artificial Sequence
  Synthetic polypeptide representing artificial human antibody VL domain
DIQLTQSPSFLSASVGDRVTITCRASQGISSYLAWYQQKPGKAPKLLIYAASTLQSGVPSRFSGSGSGTEFTLTISSLQPEDFATYYCQQLNSYPQTFGQGTKVEIK

SEQ ID NO: 19981 - protein, 113 aa, Artificial Sequence
  Synthetic polypeptide representing artificial human antibody VL domain
DIVMTQSPDALAVPLGERVTINCKSSQTILSPSYNKYYLAWYQKKSGQPPRLLIYWASTREFDVPGRFSGGGSETEFTLTIDNLQAEDAAFYFCQQYYTTPYTFGQGTKVEIK

SEQ ID NO: 19982 - protein, 112 aa, Artificial Sequence
  Synthetic polypeptide representing artificial human antibody VL domain
QSALTQPPSASGSPGQSVTISCTGTSGDVGTYNYVSWYQQHPGKAPKLIIYEVSKRPSGVPVRFSGSKSGNTASLTVSGLQAEDEADYYCSSYAGNSKHNYVFGTGTKVTVL

SEQ ID NO: 19983 - protein, 111 aa, Artificial Sequence
  Synthetic polypeptide representing artificial human antibody VL domain
QSVLTQPPSASGTPGQRVTISCSGSTSNIGSNTVTWYQQLPGTAPRLLIYSDDQRPSGVPDRFSASRSGTSASLAISGLQSEDEADYYCAAWDDSLDGHWVFGGGTKLTVL

SEQ ID NO: 19984 - protein, 107 aa, Artificial Sequence
  Synthetic polypeptide representing artificial human antibody VL domain
EIVLTQSPATLSVSPGERATLSCRASQSVRSFLAWYQQKPGQAPRLLISDASNRATGIPARFRGSGSGTDFTLTISSLEPEDFAVYYCQQRSNWPFTFGPGTKVDIK

SEQ ID NO: 19985 - protein, 111 aa, Artificial Sequence
  Synthetic polypeptide representing artificial human antibody VL domain
QSVLTQPPSVSGAPGQSVTISCAGSSSNIGAPYDVHWYQQFPGTAPKLLIHDNYNRPSGVPDRFSGSRSGTSASLAITGLQAEDEADYYCQSYDSSLSGYVFGIGTKVTVL

SEQ ID NO: 19986 - protein, 109 aa, Artificial Sequence
  Synthetic polypeptide representing artificial human antibody VL domain
QAVVTQEPSLTVSPGGTVTLTCGSSTGAVTSGHYPYWFQQKPGQAPRTLIYETSNKYSWTPARFSGFLLGGQAALTLSGAQSEDEAEYYCLLSYSGASVFGGGTKLTVL

SEQ ID NO: 19987 - protein, 110 aa, Artificial Sequence; identical to SEQ ID NO: 19267
  Synthetic polypeptide representing artificial human antibody VL domain

SEQ ID NO: 19988 - protein, 110 aa, Artificial Sequence
  Synthetic polypeptide representing artificial human antibody VL domain
QSALTQPASVSGSPGQSITISYTGTSSDVGGYNYVSWYQQHPGKAPKLMICDVSKRPSGVSNRFSGSKSGNTASLTISGLQAEDEADYYCSSYTSSSTQVFGTGTKVTVL

SEQ ID NO: 19989 - protein, 105 aa, Artificial Sequence; identical to SEQ ID NO: 18981
  Synthetic polypeptide representing artificial human antibody VL domain

SEQ ID NO: 19990 - protein, 108 aa, Artificial Sequence; identical to SEQ ID NO: 19459
  Synthetic polypeptide representing artificial human antibody VL domain

SEQ ID NO: 19991 - protein, 110 aa, Artificial Sequence
  Synthetic polypeptide representing artificial human antibody VL domain
QSVLTQPPSVSAAPGQKVTISCSGSTSNIGDNWISWYQQFPDTVPKLIIYDDSKRVSGIPDRFSGSRSGTSVTLAITGLQTGDEADYYCSSWDSGLSAVVFGGGTRLTVL

SEQ ID NO: 19992 - protein, 110 aa, Artificial Sequence
  Synthetic polypeptide representing artificial human antibody VL domain
QSALTQPPSASGTPGQRVIISCSEGTSKIGRNHVYWYQQLPGTAPKLLIYKTIQRPSGVPDRFSGSKSDTSASLAISGLRSEDEADYHCATWDDGLSRPVFGGGTRLTVL

SEQ ID NO: 19993 - protein, 109 aa, Artificial Sequence
  Synthetic polypeptide representing artificial human antibody VL domain
EIVLTQFPGSLSLSPGESATLFCRASQTVYFRYLAWYQQKPGQPPRLLIYGGSNRATGIPDRISGSRSGTDFTLTISRLEPEDSAVYYCQQFGNSPLYTFGQGTKVEIK

SEQ ID NO: 19994 - protein, 110 aa, Artificial Sequence
  Synthetic polypeptide representing artificial human antibody VL domain
QSVVTQPPSVSGTPGQSVTISCSGSGSNIGGHKVDWYQHLPGTAPKLIIYDDSLRHSGAPDRFSGSKSGSSASLVINGLQSVDEGDYYCLTWDYSLNARVFGGGTRLTVL

SEQ ID NO: 19995 - protein, 109 aa, Artificial Sequence
  Synthetic polypeptide representing artificial human antibody VL domain
SYDLTQPPSLSVSPGQTARITCSGDDLSKNYAYWYQQRPGQAPMLVIHKDSERPSGIPERFSGSSSGTIATLTISGVQAEDEADYYCQSVVKDVTPYVIFGGGTKLTVL

SEQ ID NO: 19996 - protein, 110 aa, Artificial Sequence
  Synthetic polypeptide representing artificial human antibody VL domain
QSVLTQPPSASGTPGQRVTISCSGSSSNIGSNYVYWYQQLPGTAPKLLIYSNNQRPSGVPDRFSGSKSGTSASLAISGLRSEDEADYYCAAWDDSLSGPVFGGGTKLTVL

SEQ ID NO: 19997 - protein, 108 aa, Artificial Sequence
  Synthetic polypeptide representing artificial human antibody VL domain
EIVMTQSPATLSVSPGERATLSCRASQSVSSNLAWYQQKPGQAPRLLIYGASTRATGVPTRFSGSGSGTEFTLTISSLQSEDFALYYCQQYNNWPPLTFGGGTKVEIK

SEQ ID NO: 19998 - protein, 107 aa, Artificial Sequence
  Synthetic polypeptide representing artificial human antibody VL domain
DIQMTQSPSTLSASVGDRVTITCRASQSISSWLAWYQQKPGKAPKLLIYKASSLESGVPSRFSGSGSGTEFTLTISSLQPDDFATYYCQQYNSYPWTFGQGTKVEIK

SEQ ID NO: 19999 - protein, 108 aa, Artificial Sequence
  Synthetic polypeptide representing artificial human antibody VL domain
DIQMTQSPSSLSASVGDRVTITCRASQSISSYLNWYQQKPGKAPKLLIYAASSLQSGVPSRFSGSGSGTDFTLTISSLQPEDFATYYCQQSYSTPPWTFGQGTKVEIK

SEQ ID NO: 20000 - protein, 107 aa, Artificial Sequence
  Synthetic polypeptide representing artificial human antibody VL domain
DIQLTQSPSFLSASVGDRVTITCRASQGISSYLAWYQQKPGKAPKLLIYAASTLQSGVPSRFSGSGSGTEFTLTISSLQPEDFATYYCQQLNSYPFTFGPGTKVDIK

SEQ ID NO: 20001 - protein, 12 aa, SARS-CoV-2
  SARS-CoV-2 spike protein residues 1-12 (subunit S1)
MFVFLVLLPLVS

SEQ ID NO: 20002 - protein, 12 aa, SARS-CoV-2
  SARS-CoV-2 spike protein residues 7-18 (subunit S1)
LLPLVSSQCVNL

SEQ ID NO: 20003 - protein, 12 aa, SARS-CoV-2
  SARS-CoV-2 spike protein residues 13-24 (subunit S1)
SQCVNLTTRTQL

SEQ ID NO: 20004 - protein, 12 aa, SARS-CoV-2
  SARS-CoV-2 spike protein residues 19-30 (subunit S1)
TTRTQLPPAYTN

SEQ ID NO: 20005 - protein, 12 aa, SARS-CoV-2
  SARS-CoV-2 spike protein residues 25-36 (subunit S1)
PPAYTNSFTRGV

SEQ ID NO: 20006 - protein, 12 aa, SARS-CoV-2
  SARS-CoV-2 spike protein residues 31-42 (subunit S1)
SFTRGVYYPDKV

SEQ ID NO: 20007 - protein, 12 aa, SARS-CoV-2
  SARS-CoV-2 spike protein residues 37-48 (subunit S1)
YYPDKVFRSSVL

SEQ ID NO: 20008 - protein, 12 aa, SARS-CoV-2
  SARS-CoV-2 spike protein residues 43-54 (subunit S1)
FRSSVLHSTQDL

SEQ ID NO: 20009 - protein, 12 aa, SARS-CoV-2
  SARS-CoV-2 spike protein residues 49-60 (subunit S1)
HSTQDLFLPFFS

SEQ ID NO: 20010 - protein, 12 aa, SARS-CoV-2
  SARS-CoV-2 spike protein residues 55-66 (subunit S1)
FLPFFSNVTWFH

SEQ ID NO: 20011 - protein, 12 aa, SARS-CoV-2
  SARS-CoV-2 spike protein residues 61-72 (subunit S1)
NVTWFHAIHVSG

SEQ ID NO: 20012 - protein, 12 aa, SARS-CoV-2
  SARS-CoV-2 spike protein residues 67-78 (subunit S1)
AIHVSGTNGTKR

SEQ ID NO: 20013 - protein, 12 aa, SARS-CoV-2
  SARS-CoV-2 spike protein residues 73-84 (subunit S1)
TNGTKRFDNPVL

SEQ ID NO: 20014 - protein, 12 aa, SARS-CoV-2
  SARS-CoV-2 spike protein residues 79-90 (subunit S1)
FDNPVLPFNDGV

SEQ ID NO: 20015 - protein, 12 aa, SARS-CoV-2
  SARS-CoV-2 spike protein residues 85-96 (subunit S1)
PFNDGVYFASTE

SEQ ID NO: 20016 - protein, 12 aa, SARS-CoV-2
  SARS-CoV-2 spike protein residues 91-102 (subunit S1)
YFASTEKSNIIR

SEQ ID NO: 20017 - protein, 12 aa, SARS-CoV-2
  SARS-CoV-2 spike protein residues 97-108 (subunit S1)
KSNIIRGWIFGT

SEQ ID NO: 20018 - protein, 12 aa, SARS-CoV-2
  SARS-CoV-2 spike protein residues 103-114 (subunit S1)
GWIFGTTLDSKT

SEQ ID NO: 20019 - protein, 12 aa, SARS-CoV-2
  SARS-CoV-2 spike protein residues 109-120 (subunit S1)
TLDSKTQSLLIV

SEQ ID NO: 20020 - protein, 12 aa, SARS-CoV-2
  SARS-CoV-2 spike protein residues 115-126 (subunit S1)
QSLLIVNNATNV

SEQ ID NO: 20021 - protein, 12 aa, SARS-CoV-2
  SARS-CoV-2 spike protein residues 121-132 (subunit S1)
NNATNVVIKVCE

SEQ ID NO: 20022 - protein, 12 aa, SARS-CoV-2
  SARS-CoV-2 spike protein residues 127-138 (subunit S1)
VIKVCEFQFCND

SEQ ID NO: 20023 - protein, 12 aa, SARS-CoV-2
  SARS-CoV-2 spike protein residues 133-144 (subunit S1)
FQFCNDPFLGVY

SEQ ID NO: 20024 - protein, 12 aa, SARS-CoV-2
  SARS-CoV-2 spike protein residues 139-150 (subunit S1)
PFLGVYYHKNNK

SEQ ID NO: 20025 - protein, 12 aa, SARS-CoV-2
  SARS-CoV-2 spike protein residues 145-156 (subunit S1)
YHKNNKSWMESE

SEQ ID NO: 20026 - protein, 12 aa, SARS-CoV-2
  SARS-CoV-2 spike protein residues 151-162 (subunit S1)
SWMESEFRVYSS

SEQ ID NO: 20027 - protein, 12 aa, SARS-CoV-2
  SARS-CoV-2 spike protein residues 157-168 (subunit S1)
FRVYSSANNCTF

SEQ ID NO: 20028 - protein, 12 aa, SARS-CoV-2
  SARS-CoV-2 spike protein residues 163-174 (subunit S1)
ANNCTFEYVSQP

SEQ ID NO: 20029 - protein, 12 aa, SARS-CoV-2
  SARS-CoV-2 spike protein residues 169-180 (subunit S1)
EYVSQPFLMDLE

SEQ ID NO: 20030 - protein, 12 aa, SARS-CoV-2
  SARS-CoV-2 spike protein residues 175-186 (subunit S1)
FLMDLEGKQGNF

SEQ ID NO: 20031 - protein, 12 aa, SARS-CoV-2
  SARS-CoV-2 spike protein residues 181-192 (subunit S1)
GKQGNFKNLREF

SEQ ID NO: 20032 - protein, 12 aa, SARS-CoV-2
  SARS-CoV-2 spike protein residues 187-198 (subunit S1)
KNLREFVFKNID

SEQ ID NO: 20033 - protein, 12 aa, SARS-CoV-2
  SARS-CoV-2 spike protein residues 193-204 (subunit S1)
VFKNIDGYFKIY

SEQ ID NO: 20034 - protein, 12 aa, SARS-CoV-2
  SARS-CoV-2 spike protein residues 199-210 (subunit S1)
GYFKIYSKHTPI

SEQ ID NO: 20035 - protein, 12 aa, SARS-CoV-2
  SARS-CoV-2 spike protein residues 205-216 (subunit S1)
SKHTPINLVRDL

SEQ ID NO: 20036 - protein, 12 aa, SARS-CoV-2
  SARS-CoV-2 spike protein residues 211-222 (subunit S1)
NLVRDLPQGFSA

SEQ ID NO: 20037 - protein, 12 aa, SARS-CoV-2
  SARS-CoV-2 spike protein residues 217-228 (subunit S1)
PQGFSALEPLVD

SEQ ID NO: 20038 - protein, 12 aa, SARS-CoV-2
  SARS-CoV-2 spike protein residues 223-234 (subunit S1)
LEPLVDLPIGIN

SEQ ID NO: 20039 - protein, 12 aa, SARS-CoV-2
  SARS-CoV-2 spike protein residues 229-240 (subunit S1)
LPIGINITRFQT

SEQ ID NO: 20040 - protein, 12 aa, SARS-CoV-2
  SARS-CoV-2 spike protein residues 235-246 (subunit S1)
ITRFQTLLALHR

SEQ ID NO: 20041 - protein, 12 aa, SARS-CoV-2
  SARS-CoV-2 spike protein residues 241-252 (subunit S1)
LLALHRSYLTPG

SEQ ID NO: 20042 - protein, 12 aa, SARS-CoV-2
  SARS-CoV-2 spike protein residues 247-258 (subunit S1)
SYLTPGDSSSGW

SEQ ID NO: 20043 - protein, 12 aa, SARS-CoV-2
  SARS-CoV-2 spike protein residues 253-264 (subunit S1)
DSSSGWTAGAAA

SEQ ID NO: 20044 - protein, 12 aa, SARS-CoV-2
  SARS-CoV-2 spike protein residues 259-270 (subunit S1)
TAGAAAYYVGYL

SEQ ID NO: 20045 - protein, 12 aa, SARS-CoV-2
  SARS-CoV-2 spike protein residues 265-276 (subunit S1)
YYVGYLQPRTFL

SEQ ID NO: 20046 - protein, 12 aa, SARS-CoV-2
  SARS-CoV-2 spike protein residues 271-282 (subunit S1)
QPRTFLLKYNEN

SEQ ID NO: 20047 - protein, 12 aa, SARS-CoV-2
  SARS-CoV-2 spike protein residues 277-288 (subunit S1)
LKYNENGTITDA

SEQ ID NO: 20048 - protein, 12 aa, SARS-CoV-2
  SARS-CoV-2 spike protein residues 283-294 (subunit S1)
GTITDAVDCALD

SEQ ID NO: 20049 - protein, 12 aa, SARS-CoV-2
  SARS-CoV-2 spike protein residues 289-300 (subunit S1)
VDCALDPLSETK

SEQ ID NO: 20050 - protein, 12 aa, SARS-CoV-2
  SARS-CoV-2 spike protein residues 295-306 (subunit S1)
PLSETKCTLKSF

SEQ ID NO: 20051 - protein, 12 aa, SARS-CoV-2
  SARS-CoV-2 spike protein residues 301-312 (subunit S1)
CTLKSFTVEKGI

SEQ ID NO: 20052 - protein, 12 aa, SARS-CoV-2
  SARS-CoV-2 spike protein residues 307-318 (subunit S1)
TVEKGIYQTSNF

SEQ ID NO: 20053 - protein, 12 aa, SARS-CoV-2
  SARS-CoV-2 spike protein residues 313-324 (subunit S1)
YQTSNFRVQPTE

SEQ ID NO: 20054 - protein, 12 aa, SARS-CoV-2
  SARS-CoV-2 spike protein residues 319-330 (subunit S1)
RVQPTESIVRFP

SEQ ID NO: 20055 - protein, 12 aa, SARS-CoV-2
  SARS-CoV-2 spike protein residues 325-336 (subunit S1)
SIVRFPNITNLC

SEQ ID NO: 20056 - protein, 12 aa, SARS-CoV-2
  SARS-CoV-2 spike protein residues 331-342 (subunit S1)
NITNLCPFGEVF

SEQ ID NO: 20057 - protein, 12 aa, SARS-CoV-2
  SARS-CoV-2 spike protein residues 337-348 (subunit S1)
PFGEVFNATRFA

SEQ ID NO: 20058 - protein, 12 aa, SARS-CoV-2
  SARS-CoV-2 spike protein residues 343-354 (subunit S1)
NATRFASVYAWN

SEQ ID NO: 20059 - protein, 12 aa, SARS-CoV-2
  SARS-CoV-2 spike protein residues 349-360 (subunit S1)
SVYAWNRKRISN

SEQ ID NO: 20060 - protein, 12 aa, SARS-CoV-2
  SARS-CoV-2 spike protein residues 355-366 (subunit S1)
RKRISNCVADYS

SEQ ID NO: 20061 - protein, 12 aa, SARS-CoV-2
  SARS-CoV-2 spike protein residues 361-372 (subunit S1)
CVADYSVLYNSA

SEQ ID NO: 20062 - protein, 12 aa, SARS-CoV-2
  SARS-CoV-2 spike protein residues 367-378 (subunit S1)
VLYNSASFSTFK

SEQ ID NO: 20063 - protein, 12 aa, SARS-CoV-2
  SARS-CoV-2 spike protein residues 373-384 (subunit S1)
SFSTFKCYGVSP

SEQ ID NO: 20064 - protein, 12 aa, SARS-CoV-2
  SARS-CoV-2 spike protein residues 379-390 (subunit S1)
CYGVSPTKLNDL

SEQ ID NO: 20065 - protein, 12 aa, SARS-CoV-2
  SARS-CoV-2 spike protein residues 385-396 (subunit S1)
TKLNDLCFTNVY

SEQ ID NO: 20066 - protein, 12 aa, SARS-CoV-2
  SARS-CoV-2 spike protein residues 391-402 (subunit S1)
CFTNVYADSFVI

SEQ ID NO: 20067 - protein, 12 aa, SARS-CoV-2
  SARS-CoV-2 spike protein residues 397-408 (subunit S1)
ADSFVIRGDEVR

SEQ ID NO: 20068 - protein, 12 aa, SARS-CoV-2
  SARS-CoV-2 spike protein residues 403-414 (subunit S1)
RGDEVRQIAPGQ

SEQ ID NO: 20069 - protein, 12 aa, SARS-CoV-2
  SARS-CoV-2 spike protein residues 409-420 (subunit S1)
QIAPGQTGKIAD

SEQ ID NO: 20070 - protein, 12 aa, SARS-CoV-2
  SARS-CoV-2 spike protein residues 415-426 (subunit S1)
TGKIADYNYKLP

SEQ ID NO: 20071 - protein, 12 aa, SARS-CoV-2
  SARS-CoV-2 spike protein residues 421-432 (subunit S1)
YNYKLPDDFTGC

SEQ ID NO: 20072 - protein, 12 aa, SARS-CoV-2
  SARS-CoV-2 spike protein residues 427-438 (subunit S1)
DDFTGCVIAWNS

SEQ ID NO: 20073 - protein, 12 aa, SARS-CoV-2
  SARS-CoV-2 spike protein residues 433-444 (subunit S1)
VIAWNSNNLDSK

SEQ ID NO: 20074 - protein, 12 aa, SARS-CoV-2
  SARS-CoV-2 spike protein residues 439-450 (subunit S1)
NNLDSKVGGNYN

SEQ ID NO: 20075 - protein, 12 aa, SARS-CoV-2
  SARS-CoV-2 spike protein residues 445-456 (subunit S1)
VGGNYNYLYRLF

SEQ ID NO: 20076 - protein, 12 aa, SARS-CoV-2
  SARS-CoV-2 spike protein residues 451-462 (subunit S1)
YLYRLFRKSNLK

SEQ ID NO: 20077 - protein, 12 aa, SARS-CoV-2
  SARS-CoV-2 spike protein residues 457-468 (subunit S1)
RKSNLKPFERDI

SEQ ID NO: 20078 - protein, 12 aa, SARS-CoV-2
  SARS-CoV-2 spike protein residues 463-474 (subunit S1)
PFERDISTEIYQ

SEQ ID NO: 20079 - protein, 12 aa, SARS-CoV-2
  SARS-CoV-2 spike protein residues 469-480 (subunit S1)
STEIYQAGSTPC

SEQ ID NO: 20080 - protein, 12 aa, SARS-CoV-2
  SARS-CoV-2 spike protein residues 475-486 (subunit S1)
AGSTPCNGVEGF

SEQ ID NO: 20081 - protein, 12 aa, SARS-CoV-2
  SARS-CoV-2 spike protein residues 481-492 (subunit S1)
NGVEGFNCYFPL

SEQ ID NO: 20082 - protein, 12 aa, SARS-CoV-2
  SARS-CoV-2 spike protein residues 487-498 (subunit S1)
NCYFPLQSYGFQ

SEQ ID NO: 20083 - protein, 12 aa, SARS-CoV-2
  SARS-CoV-2 spike protein residues 493-504 (subunit S1)
QSYGFQPTNGVG

SEQ ID NO: 20084 - protein, 12 aa, SARS-CoV-2
  SARS-CoV-2 spike protein residues 499-510 (subunit S1)
PTNGVGYQPYRV

SEQ ID NO: 20085 - protein, 12 aa, SARS-CoV-2
  SARS-CoV-2 spike protein residues 505-516 (subunit S1)
YQPYRVVVLSFE

SEQ ID NO: 20086 - protein, 12 aa, SARS-CoV-2
  SARS-CoV-2 spike protein residues 511-522 (subunit S1)
VVLSFELLHAPA

SEQ ID NO: 20087 - protein, 12 aa, SARS-CoV-2
  SARS-CoV-2 spike protein residues 517-528 (subunit S1)
LLHAPATVCGPK

SEQ ID NO: 20088 - protein, 12 aa, SARS-CoV-2
  SARS-CoV-2 spike protein residues 523-534 (subunit S1)
TVCGPKKSTNLV

SEQ ID NO: 20089 - protein, 12 aa, SARS-CoV-2
  SARS-CoV-2 spike protein residues 529-540 (subunit S1)
KSTNLVKNKCVN

SEQ ID NO: 20090 - protein, 12 aa, SARS-CoV-2
  SARS-CoV-2 spike protein residues 535-546 (subunit S1)
KNKCVNFNFNGL

SEQ ID NO: 20091 - protein, 12 aa, SARS-CoV-2
  SARS-CoV-2 spike protein residues 541-552 (subunit S1)
FNFNGLTGTGVL

SEQ ID NO: 20092 - protein, 12 aa, SARS-CoV-2
  SARS-CoV-2 spike protein residues 547-558 (subunit S1)
TGTGVLTESNKK

SEQ ID NO: 20093 - protein, 12 aa, SARS-CoV-2
  SARS-CoV-2 spike protein residues 553-564 (subunit S1)
TESNKKFLPFQQ

SEQ ID NO: 20094 - protein, 12 aa, SARS-CoV-2
  SARS-CoV-2 spike protein residues 559-570 (subunit S1)
FLPFQQFGRDIA

SEQ ID NO: 20095 - protein, 12 aa, SARS-CoV-2
  SARS-CoV-2 spike protein residues 565-576 (subunit S1)
FGRDIADTTDAV

SEQ ID NO: 20096 - protein, 12 aa, SARS-CoV-2
  SARS-CoV-2 spike protein residues 571-582 (subunit S1)
DTTDAVRDPQTL

SEQ ID NO: 20097 - protein, 12 aa, SARS-CoV-2
  SARS-CoV-2 spike protein residues 577-588 (subunit S1)
RDPQTLEILDIT

SEQ ID NO: 20098 - protein, 12 aa, SARS-CoV-2
  SARS-CoV-2 spike protein residues 583-594 (subunit S1)
EILDITPCSFGG

SEQ ID NO: 20099 - protein, 12 aa, SARS-CoV-2
  SARS-CoV-2 spike protein residues 589-600 (subunit S1)
PCSFGGVSVITP

SEQ ID NO: 20100 - protein, 12 aa, SARS-CoV-2
  SARS-CoV-2 spike protein residues 595-606 (subunit S1)
VSVITPGTNTSN

SEQ ID NO: 20101 - protein, 12 aa, SARS-CoV-2
  SARS-CoV-2 spike protein residues 601-612 (subunit S1)
GTNTSNQVAVLY

SEQ ID NO: 20102 - protein, 12 aa, SARS-CoV-2
  SARS-CoV-2 spike protein residues 607-618 (subunit S1)
QVAVLYQDVNCT

SEQ ID NO: 20103 - protein, 12 aa, SARS-CoV-2
  SARS-CoV-2 spike protein residues 613-624 (subunit S1)
QDVNCTEVPVAI

SEQ ID NO: 20104 - protein, 12 aa, SARS-CoV-2
  SARS-CoV-2 spike protein residues 619-630 (subunit S1)
EVPVAIHADQLT

SEQ ID NO: 20105 - protein, 12 aa, SARS-CoV-2
  SARS-CoV-2 spike protein residues 625-636 (subunit S1)
HADQLTPTWRVY

SEQ ID NO: 20106 - protein, 12 aa, SARS-CoV-2
  SARS-CoV-2 spike protein residues 631-642 (subunit S1)
PTWRVYSTGSNV

SEQ ID NO: 20107 - protein, 12 aa, SARS-CoV-2
  SARS-CoV-2 spike protein residues 637-648 (subunit S1)
STGSNVFQTRAG

SEQ ID NO: 20108 - protein, 12 aa, SARS-CoV-2
  SARS-CoV-2 spike protein residues 643-654 (subunit S1)
FQTRAGCLIGAE

SEQ ID NO: 20109 - protein, 12 aa, SARS-CoV-2
  SARS-CoV-2 spike protein residues 649-660 (subunit S1)
CLIGAEHVNNSY

SEQ ID NO: 20110 - protein, 12 aa, SARS-CoV-2
  SARS-CoV-2 spike protein residues 655-666 (subunit S1)
HVNNSYECDIPI

SEQ ID NO: 20111 - protein, 12 aa, SARS-CoV-2
  SARS-CoV-2 spike protein residues 661-672 (subunit S1)
ECDIPIGAGICA

SEQ ID NO: 20112 - protein, 12 aa, SARS-CoV-2
  SARS-CoV-2 spike protein residues 667-678 (subunit S1)
GAGICASYQTQT

SEQ ID NO: 20113 - protein, 12 aa, SARS-CoV-2
  SARS-CoV-2 spike protein residues 673-684 (subunit S1)
SYQTQTNSPRRA

SEQ ID NO: 20114 - protein, 12 aa, SARS-CoV-2
  SARS-CoV-2 spike protein residues 679-685 (subunit S1)
NSPRRARGGGGS

SEQ ID NO: 20115 - protein, 12 aa, SARS-CoV-2
  SARS-CoV-2 spike protein residues 686-697 (subunit S2)
SVASQSIIAYTM

SEQ ID NO: 20116 - protein, 12 aa, SARS-CoV-2
  SARS-CoV-2 spike protein residues 692-703 (subunit S2)
IIAYTMSLGAEN

SEQ ID NO: 20117 - protein, 12 aa, SARS-CoV-2
  SARS-CoV-2 spike protein residues 698-709 (subunit S2)
SLGAENSVAYSN

SEQ ID NO: 20118 - protein, 12 aa, SARS-CoV-2
  SARS-CoV-2 spike protein residues 704-715 (subunit S2)
SVAYSNNSIAIP

SEQ ID NO: 20119 - protein, 12 aa, SARS-CoV-2
  SARS-CoV-2 spike protein residues 710-721 (subunit S2)
NSIAIPTNFTIS

SEQ ID NO: 20120 - protein, 12 aa, SARS-CoV-2
  SARS-CoV-2 spike protein residues 716-727 (subunit S2)
TNFTISVTTEIL

SEQ ID NO: 20121 - protein, 12 aa, SARS-CoV-2
  SARS-CoV-2 spike protein residues 722-733 (subunit S2)
VTTEILPVSMTK

SEQ ID NO: 20122 - protein, 12 aa, SARS-CoV-2
  SARS-CoV-2 spike protein residues 728-739 (subunit S2)
PVSMTKTSVDCT

SEQ ID NO: 20123 - protein, 12 aa, SARS-CoV-2
  SARS-CoV-2 spike protein residues 734-745 (subunit S2)
TSVDCTMYICGD

SEQ ID NO: 20124 - protein, 12 aa, SARS-CoV-2
  SARS-CoV-2 spike protein residues 740-751 (subunit S2)
MYICGDSTECSN

SEQ ID NO: 20125 - protein, 12 aa, SARS-CoV-2
  SARS-CoV-2 spike protein residues 746-757 (subunit S2)
STECSNLLLQYG

SEQ ID NO: 20126 - protein, 12 aa, SARS-CoV-2
  SARS-CoV-2 spike protein residues 752-763 (subunit S2)
LLLQYGSFCTQL

SEQ ID NO: 20127 - protein, 12 aa, SARS-CoV-2
  SARS-CoV-2 spike protein residues 758-769 (subunit S2)
SFCTQLNRALTG

SEQ ID NO: 20128 - protein, 12 aa, SARS-CoV-2
  SARS-CoV-2 spike protein residues 764-775 (subunit S2)
NRALTGIAVEQD

SEQ ID NO: 20129 - protein, 12 aa, SARS-CoV-2
  SARS-CoV-2 spike protein residues 770-781 (subunit S2)
IAVEQDKNTQEV

SEQ ID NO: 20130 - protein, 12 aa, SARS-CoV-2
  SARS-CoV-2 spike protein residues 776-787 (subunit S2)
KNTQEVFAQVKQ

SEQ ID NO: 20131 - protein, 12 aa, SARS-CoV-2
  SARS-CoV-2 spike protein residues 782-793 (subunit S2)
FAQVKQIYKTPP

SEQ ID NO: 20132 - protein, 12 aa, SARS-CoV-2
  SARS-CoV-2 spike protein residues 788-799 (subunit S2)
IYKTPPIKDFGG

SEQ ID NO: 20133 - protein, 12 aa, SARS-CoV-2
  SARS-CoV-2 spike protein residues 794-805 (subunit S2)
IKDFGGFNFSQI

SEQ ID NO: 20134 - protein, 12 aa, SARS-CoV-2
  SARS-CoV-2 spike protein residues 800-811 (subunit S2)
FNFSQILPDPSK

SEQ ID NO: 20135 - protein, 12 aa, SARS-CoV-2
  SARS-CoV-2 spike protein residues 806-817 (subunit S2)
LPDPSKPSKRSF

SEQ ID NO: 20136 - protein, 12 aa, SARS-CoV-2
  SARS-CoV-2 spike protein residues 812-823 (subunit S2)
PSKRSFIEDLLF

SEQ ID NO: 20137 - protein, 12 aa, SARS-CoV-2
  SARS-CoV-2 spike protein residues 818-829 (subunit S2)
IEDLLFNKVTLA

SEQ ID NO: 20138 - protein, 12 aa, SARS-CoV-2
  SARS-CoV-2 spike protein residues 824-835 (subunit S2)
NKVTLADAGFIK

SEQ ID NO: 20139 - protein, 12 aa, SARS-CoV-2
  SARS-CoV-2 spike protein residues 830-841 (subunit S2)
DAGFIKQYGDCL

SEQ ID NO: 20140 - protein, 12 aa, SARS-CoV-2
  SARS-CoV-2 spike protein residues 836-847 (subunit S2)
QYGDCLGDIAAR

SEQ ID NO: 20141 - protein, 12 aa, SARS-CoV-2
  SARS-CoV-2 spike protein residues 842-853 (subunit S2)
GDIAARDLICAQ

SEQ ID NO: 20142 - protein, 12 aa, SARS-CoV-2
  SARS-CoV-2 spike protein residues 848-859 (subunit S2)
DLICAQKFNGLT

SEQ ID NO: 20143 - protein, 12 aa, SARS-CoV-2
  SARS-CoV-2 spike protein residues 854-865 (subunit S2)
KFNGLTVLPPLL

SEQ ID NO: 20144 - protein, 12 aa, SARS-CoV-2
  SARS-CoV-2 spike protein residues 860-871 (subunit S2)
VLPPLLTDEMIA

SEQ ID NO: 20145 - protein, 12 aa, SARS-CoV-2
  SARS-CoV-2 spike protein residues 866-877 (subunit S2)
TDEMIAQYTSAL

SEQ ID NO: 20146 - protein, 12 aa, SARS-CoV-2
  SARS-CoV-2 spike protein residues 872-883 (subunit S2)
QYTSALLAGTIT

SEQ ID NO: 20147 - protein, 12 aa, SARS-CoV-2
  SARS-CoV-2 spike protein residues 878-889 (subunit S2)
LAGTITSGWTFG

SEQ ID NO: 20148 - protein, 12 aa, SARS-CoV-2
  SARS-CoV-2 spike protein residues 884-895 (subunit S2)
SGWTFGAGAALQ

SEQ ID NO: 20149 - protein, 12 aa, SARS-CoV-2
  SARS-CoV-2 spike protein residues 890-901 (subunit S2)
AGAALQIPFAMQ

SEQ ID NO: 20150 - protein, 12 aa, SARS-CoV-2
  SARS-CoV-2 spike protein residues 896-907 (subunit S2)
IPFAMQMAYRFN

SEQ ID NO: 20151 - protein, 12 aa, SARS-CoV-2
  SARS-CoV-2 spike protein residues 902-913 (subunit S2)
MAYRFNGIGVTQ

SEQ ID NO: 20152 - protein, 12 aa, SARS-CoV-2
  SARS-CoV-2 spike protein residues 908-919 (subunit S2)
GIGVTQNVLYEN

SEQ ID NO: 20153 - protein, 12 aa, SARS-CoV-2
  SARS-CoV-2 spike protein residues 914-925 (subunit S2)
NVLYENQKLIAN

SEQ ID NO: 20154 - protein, 12 aa, SARS-CoV-2
  SARS-CoV-2 spike protein residues 920-931 (subunit S2)
QKLIANQFNSAI

SEQ ID NO: 20155 - protein, 12 aa, SARS-CoV-2
  SARS-CoV-2 spike protein residues 926-937 (subunit S2)
QFNSAIGKIQDS

SEQ ID NO: 20156 - protein, 12 aa, SARS-CoV-2
  SARS-CoV-2 spike protein residues 932-943 (subunit S2)
GKIQDSLSSTAS

SEQ ID NO: 20157 - protein, 12 aa, SARS-CoV-2
  SARS-CoV-2 spike protein residues 938-949 (subunit S2)
LSSTASALGKLQ

SEQ ID NO: 20158 - protein, 12 aa, SARS-CoV-2
  SARS-CoV-2 spike protein residues 944-955 (subunit S2)
ALGKLQDVVNQN

SEQ ID NO: 20159 - protein, 12 aa, SARS-CoV-2
  SARS-CoV-2 spike protein residues 950-961 (subunit S2)
DVVNQNAQALNT

SEQ ID NO: 20160 - protein, 12 aa, SARS-CoV-2
  SARS-CoV-2 spike protein residues 956-967 (subunit S2)
AQALNTLVKQLS

SEQ ID NO: 20161 - protein, 12 aa, SARS-CoV-2
  SARS-CoV-2 spike protein residues 962-973 (subunit S2)
LVKQLSSNFGAI

SEQ ID NO: 20162 - protein, 12 aa, SARS-CoV-2
  SARS-CoV-2 spike protein residues 968-979 (subunit S2)
SNFGAISSVLND

SEQ ID NO: 20163 - protein, 12 aa, SARS-CoV-2
  SARS-CoV-2 spike protein residues 974-985 (subunit S2)
SSVLNDILSRLD

SEQ ID NO: 20164 - protein, 12 aa, SARS-CoV-2
  SARS-CoV-2 spike protein residues 980-991 (subunit S2)
ILSRLDKVEAEV

SEQ ID NO: 20165 - protein, 12 aa, SARS-CoV-2
  SARS-CoV-2 spike protein residues 986-997 (subunit S2)
KVEAEVQIDRLI

SEQ ID NO: 20166 - protein, 12 aa, SARS-CoV-2
  SARS-CoV-2 spike protein residues 992-1003 (subunit S2)
QIDRLITGRLQS

SEQ ID NO: 20167 - protein, 12 aa, SARS-CoV-2
  SARS-CoV-2 spike protein residues 998-1009 (subunit S2)
TGRLQSLQTYVT

SEQ ID NO: 20168 - protein, 12 aa, SARS-CoV-2
  SARS-CoV-2 spike protein residues 1004-1015 (subunit S2)
LQTYVTQQLIRA

SEQ ID NO: 20169 - protein, 12 aa, SARS-CoV-2
  SARS-CoV-2 spike protein residues 1010-1021 (subunit S2)
QQLIRAAEIRAS

SEQ ID NO: 20170 - protein, 12 aa, SARS-CoV-2
  SARS-CoV-2 spike protein residues 1016-1027 (subunit S2)
AEIRASANLAAT

SEQ ID NO: 20171 - protein, 12 aa, SARS-CoV-2
  SARS-CoV-2 spike protein residues 1022-1033 (subunit S2)
ANLAATKMSECV

SEQ ID NO: 20172 - protein, 12 aa, SARS-CoV-2
  SARS-CoV-2 spike protein residues 1028-1039 (subunit S2)
KMSECVLGQSKR

SEQ ID NO: 20173 - protein, 12 aa, SARS-CoV-2
  SARS-CoV-2 spike protein residues 1034-1045 (subunit S2)
LGQSKRVDFCGK

SEQ ID NO: 20174 - protein, 12 aa, SARS-CoV-2
  SARS-CoV-2 spike protein residues 1040-1051 (subunit S2)
VDFCGKGYHLMS

SEQ ID NO: 20175 - protein, 12 aa, SARS-CoV-2
  SARS-CoV-2 spike protein residues 1046-1057 (subunit S2)
GYHLMSFPQSAP

SEQ ID NO: 20176 - protein, 12 aa, SARS-CoV-2
  SARS-CoV-2 spike protein residues 1052-1063 (subunit S2)
FPQSAPHGVVFL

SEQ ID NO: 20177 - protein, 12 aa, SARS-CoV-2
  SARS-CoV-2 spike protein residues 1058-1069 (subunit S2)
HGVVFLHVTYVP

SEQ ID NO: 20178 - protein, 12 aa, SARS-CoV-2
  SARS-CoV-2 spike protein residues 1064-1075 (subunit S2)
HVTYVPAQEKNF

SEQ ID NO: 20179 - protein, 12 aa, SARS-CoV-2
  SARS-CoV-2 spike protein residues 1070-1081 (subunit S2)
AQEKNFTTAPAI

SEQ ID NO: 20180 - protein, 12 aa, SARS-CoV-2
  SARS-CoV-2 spike protein residues 1076-1087 (subunit S2)
TTAPAICHDGKA

SEQ ID NO: 20181 - protein, 12 aa, SARS-CoV-2
  SARS-CoV-2 spike protein residues 1082-1093 (subunit S2)
CHDGKAHFPREG

SEQ ID NO: 20182 - protein, 12 aa, SARS-CoV-2
  SARS-CoV-2 spike protein residues 1088-1099 (subunit S2)
HFPREGVFVSNG

SEQ ID NO: 20183 - protein, 12 aa, SARS-CoV-2
  SARS-CoV-2 spike protein residues 1094-1105 (subunit S2)
VFVSNGTHWFVT

SEQ ID NO: 20184 - protein, 12 aa, SARS-CoV-2
  SARS-CoV-2 spike protein residues 1100-1111 (subunit S2)
THWFVTQRNFYE

SEQ ID NO: 20185 - protein, 12 aa, SARS-CoV-2
  SARS-CoV-2 spike protein residues 1106-1117 (subunit S2)
QRNFYEPQIITT

SEQ ID NO: 20186 - protein, 12 aa, SARS-CoV-2
  SARS-CoV-2 spike protein residues 1112-1123 (subunit S2)
PQIITTDNTFVS

SEQ ID NO: 20187 - protein, 12 aa, SARS-CoV-2
  SARS-CoV-2 spike protein residues 1118-1129 (subunit S2)
DNTFVSGNCDVV

SEQ ID NO: 20188 - protein, 12 aa, SARS-CoV-2
  SARS-CoV-2 spike protein residues 1124-1135 (subunit S2)
GNCDVVIGIVNN

SEQ ID NO: 20189 - protein, 12 aa, SARS-CoV-2
  SARS-CoV-2 spike protein residues 1130-1141 (subunit S2)
IGIVNNTVYDPL

SEQ ID NO: 20190 - protein, 12 aa, SARS-CoV-2
  SARS-CoV-2 spike protein residues 1136-1147 (subunit S2)
TVYDPLQPELDS

SEQ ID NO: 20191 - protein, 12 aa, SARS-CoV-2
  SARS-CoV-2 spike protein residues 1142-1153 (subunit S2)
QPELDSFKEELD

SEQ ID NO: 20192 - protein, 12 aa, SARS-CoV-2
  SARS-CoV-2 spike protein residues 1148-1159 (subunit S2)
FKEELDKYFKNH

SEQ ID NO: 20193 - protein, 12 aa, SARS-CoV-2
  SARS-CoV-2 spike protein residues 1154-1165 (subunit S2)
KYFKNHTSPDVD

SEQ ID NO: 20194 - protein, 12 aa, SARS-CoV-2
  SARS-CoV-2 spike protein residues 1160-1171 (subunit S2)
TSPDVDLGDISG

SEQ ID NO: 20195 - protein, 12 aa, SARS-CoV-2
  SARS-CoV-2 spike protein residues 1166-1177 (subunit S2)
LGDISGINASVV

SEQ ID NO: 20196 - protein, 12 aa, SARS-CoV-2
  SARS-CoV-2 spike protein residues 1172-1183 (subunit S2)
INASVVNIQKEI

SEQ ID NO: 20197 - protein, 12 aa, SARS-CoV-2
  SARS-CoV-2 spike protein residues 1178-1189 (subunit S2)
NIQKEIDRLNEV

SEQ ID NO: 20198 - protein, 12 aa, SARS-CoV-2
  SARS-CoV-2 spike protein residues 1184-1195 (subunit S2)
DRLNEVAKNLNE

SEQ ID NO: 20199 - protein, 12 aa, SARS-CoV-2
  SARS-CoV-2 spike protein residues 1190-1201 (subunit S2)
AKNLNESLIDLQ

SEQ ID NO: 20200 - protein, 12 aa, SARS-CoV-2
  SARS-CoV-2 spike protein residues 1196-1207 (subunit S2)
SLIDLQELGKYE

SEQ ID NO: 20201 - protein, 12 aa, SARS-CoV-2
  SARS-CoV-2 spike protein residues 1202-1213 (subunit S2)
ELGKYEQYIKWP

SEQ ID NO: 20202 - protein, 12 aa, SARS-CoV-2
  SARS-CoV-2 spike protein residues 1208-1219 (subunit S2)
QYIKWPWYIWLG

SEQ ID NO: 20203 - protein, 12 aa, SARS-CoV-2
  SARS-CoV-2 spike protein residues 1214-1225 (subunit S2)
WYIWLGFIAGLI

SEQ ID NO: 20204 - protein, 12 aa, SARS-CoV-2
  SARS-CoV-2 spike protein residues 1220-1231 (subunit S2)
FIAGLIAIVMVT

SEQ ID NO: 20205 - protein, 12 aa, SARS-CoV-2
  SARS-CoV-2 spike protein residues 1226-1237 (subunit S2)
AIVMVTIMLCCM

SEQ ID NO: 20206 - protein, 12 aa, SARS-CoV-2
  SARS-CoV-2 spike protein residues 1232-1243 (subunit S2)
IMLCCMTSCCSC

SEQ ID NO: 20207 - protein, 12 aa, SARS-CoV-2
  SARS-CoV-2 spike protein residues 1238-1249 (subunit S2)
TSCCSCLKGCCS

SEQ ID NO: 20208 - protein, 12 aa, SARS-CoV-2
  SARS-CoV-2 spike protein residues 1244-1255 (subunit S2)
LKGCCSCGSCCK

SEQ ID NO: 20209 - protein, 12 aa, SARS-CoV-2
  SARS-CoV-2 spike protein residues 1250-1261 (subunit S2)
CGSCCKFDEDDS

SEQ ID NO: 20210 - protein, 12 aa, SARS-CoV-2
  SARS-CoV-2 spike protein residues 1256-1267 (subunit S2)
FDEDDSEPVLKG

SEQ ID NO: 20211 - protein, 12 aa, SARS-CoV-2
  SARS-CoV-2 spike protein residues 1262-1273 (subunit S2)
EPVLKGVKLHYT
